(19) United States
(12) Patent Application Publication
(10) Pub. No.: US 2021/0009987 A1
(43) Pub. Date: Jan. 14, 2021

(54) RNA-TARGETING KNOCKDOWN AND REPLACEMENT COMPOSITIONS AND METHODS FOR USE

(71) Applicant: Locana, Inc., San Diego, CA (US)

(72) Inventors: David A. NELLES, San Diego, CA (US); Ranjan BATRA, San Diego, CA (US)

(21) Appl. No.: 16/926,205

(22) Filed: Jul. 10, 2020

Related U.S. Application Data
(60) Provisional application No. 62/872,604, filed on Jul. 10, 2019.
(60) Provisional application No. 62/968,819, filed on Jan. 31, 2020.

(51) Int. Cl. C12N 15/10; C12N 15/861; C07K 14/00

(52) U.S. Cl. CPC C12N 15/102; C07K 14/00; C12N 15/861

(57) ABSTRACT

Disclosed are compositions and methods for specifically targeting and knocking down pathogenic RNA molecules which lead to toxic gain-or-loss-of-function mutations while also replacing the targeted, and knocked down, gene with a therapeutic replacement gene.

### CROSS-REFERENCE TO RELATED APPLICATIONS

[0001] This application claims priority to, and the benefit of, U.S. provisional application Nos. 62/872,604, filed Jul. 10, 2019 and 62/968,819 filed Jan. 31, 2020, under 35 USC § 119(e). The contents of each of these applications are hereby incorporated by reference in their entireties.

### FIELD OF THE DISCLOSURE

[0002] The disclosure is directed to molecular biology, gene therapy, and compositions and methods for modifying expression and activity of RNA molecules.

### INCORPORATION BY REFERENCE OF SEQUENCE LISTING

[0003] The contents of the text file named “LOCN_005_001US_SeqList_ST25”, which was created on Jul. 10, 2020 and is 6.07 MB in size, are hereby incorporated by reference in their entirety.

### BACKGROUND

[0004] There has been a long-felt but unmet need in the art for providing effective gain-or loss-of-function gene replacement therapies. There is also a long-felt need in the art for providing effective methods of RNA-targeting systems. The disclosure, thus, provides a combination of RNA-targeting and gene replacement strategies. In particular, the disclosure provides compositions and methods for specifically targeting and knocking down pathogenic RNA molecules, which lead to toxic gain-or-loss-of-function mutations, in a sequence-specific manner while also replacing the targeted, and knocked down, gene with a therapeutic replacement gene.

### SUMMARY

[0005] The disclosure provides a composition comprising a nucleic acid sequence encoding an RNA-guided target RNA knockdown and replacement therapeutic comprising (a) an RNA-binding polypeptide or portion thereof, and (b) a therapeutic protein, wherein the RNA-binding polypeptide binds and cleaves a target RNA when guided by a gRNA sequence, wherein a pathogenic RNA comprises the target RNA, and wherein the therapeutic protein is a replacement of gain-or-loss-of-function mutations encoded by the pathogenic RNA.

[0006] The disclosure provides a composition comprising a nucleic acid sequence encoding a target RNA knockdown and replacement therapeutic comprising (a) an RNA-binding polypeptide or portion thereof, and (b) a therapeutic protein, wherein the RNA-binding polypeptide binds and cleaves a target RNA or a protein encoded by the target RNA, wherein a pathogenic RNA encoding a pathogenic protein with one or more gain-or-loss-of-function mutations comprises the target RNA, and wherein the therapeutic protein is a replacement protein for the pathogenic protein.

[0007] The disclosure also provides a composition comprising a nucleic acid sequence encoding a target RNA knockdown and replacement therapeutic for treating retinitis pigmentosa (RP) comprising (a) an RNA-binding polypeptide or portion thereof; and (b) a therapeutic protein, wherein the RNA-binding polypeptide binds and cleaves a target rhodopsin RNA or a protein encoded by the target rhodopsin RNA, wherein a pathogenic rhodopsin RNA encoding a pathogenic rhodopsin protein with one or more gain-or-loss-of-function rhodopsin mutations comprises the target rhodopsin RNA, and wherein the therapeutic protein is a wild-type rhodopsin protein.

[0008] In some embodiments, the RNA-binding polypeptide is a RNA-guided RNA-binding protein. In some embodiments, the RNA-guided RNA-binding protein is Cas13a, Cas13b, Cas13c, or Cas13d. In some embodiments, the RNA-binding polypeptide is a non-guided RNA-binding polypeptide. In some embodiments, the non-guided RNA-binding polypeptide is PUF, or PUMBY protein. In some embodiments, the non-guided RNA-binding polypeptide a PUF or PUMBY fusion protein. In one embodiment, a PUF or PUMBY-based first RNA-binding protein is fused to a second RNA-binding protein which is an zinc-finger endonuclease known as ZC3H12A of SEQ ID NO: 358 (also termed herein E17).

[0009] In some embodiments, the therapeutic replacement gene (corresponding disease) is selected from the group consisting of: rhodopsin (Retinitis Pigmentosa), PRPF3 (Retinitis Pigmentosa), PRPF31 (autosomal dominant Retinitis Pigmentosa), GRN (FTD), SOD1 (ALS), PMP22 (Charcot Marie Tooth Disease), PABPN1 (Oculopharangeal Muscular Dystrophy), KCNQ4 (Hearing Loss), CLRN1 (Usher Syndrome), APOE2 (Alzheimer's Disease), APOE4 (Alzheimer's Disease), BEST1 (Eye Disease), MYBPC3 (Familial Cardiomyopathy), TNNT2 (Familial Cardiomyopathy), and TNNI3 (Familial Cardiomyopathy).

[0010] In some embodiments, the therapeutic protein is rhodopsin or wild-type rhodopsin. In some embodiments, the therapeutic protein is human rhodopsin. In some embodiments, the therapeutic protein is “hardened” rhodopsin.

[0011] In some embodiments of the compositions of the disclosure, the pathogenic rhodopsin RNA comprises or encodes at least one gain-or-loss-of-function mutation.

[0012] In some embodiments, the rhodopsin target RNA comprises GCCAGCGTGGCATTCTACATCTTC (SEQ ID NO: 406). In some embodiments, the rhodopsin target RNA comprises CAACGAGTCTTTTGTCATCTACATGT (SEQ ID NO: 462), CGCCAGCGTGGCATTCTACATCTTCA (SEQ ID NO: 463), or CATCTATATCATGATGAACAAGCAGT (SEQ ID NO: 464).

[0013] In some embodiments, the target RNA encodes an amino acid sequence comprising ASVAFYIF (SEQ ID NO: 407) at positions 269 to 276. In some embodiments, the target RNA encodes an amino acid comprising YASVAFYIFT (SEQ ID NO: 486) at positions 268 to 277.

[0014] In some embodiments, the “hardened” rhodopsin is encoded by a nucleic acid sequence which does not comprise the rhodopsin target RNA comprising GCCAGCGTGGCATTCTACATCTTC (SEQ ID NO: 406).

[0015] In some embodiments, the “hardened” rhodopsin is encoded by a nucleic acid sequence comprising GCTTCCGTAGCTTTTTATATTTTT (SEQ ID NO: 408).

[0016] In some embodiments, the nucleic acid sequence comprises at least one promoter. In some embodiments, the at least one promoter is a constitutive promoter or a tissue-specific promoter. In some embodiments, the at least one promoter is selected from the group consisting of an opsin promoter, an EFS promoter, and a combination thereof. In some embodiments, the nucleic acid sequence comprises two promoters. In one embodiment, the two promoters are an opsin promoter driving expression of the replacement rhodopsin protein and an EFS promoter driving expression of the PUF or PUMBY-based RNA-binding protein fused to a second RNA-binding protein which is an effector protein such as ZC3H12A.

[0017] In some embodiments disclosed herein is a vector comprising the knockdown replacement compositions disclosed herein. In some embodiments, the vector is selected from the group consisting of: adeno-associated virus, retrovirus, lentivirus, adenovirus, nanoparticle, micelle, liposome, lipoplex, polymersome, polyplex, and dendrimer. In some embodiments disclosed herein is a cell comprising the vectors disclosed herein.

[0018] In some embodiments of the compositions disclosed herein, the RNA-binding polypeptide is a first RNA-binding polypeptide, and the nucleic acid sequence encodes a second RNA-binding polypeptide which binds RNA in a manner in which it associates with RNA. In some embodiments, the second RNA-binding polypeptide associates with RNA in a manner in which it cleaves RNA. In some embodiments, the second RNA-binding polypeptide is selected from the group consisting of: RNAse1, RNAse4, RNAse6, RNAse7, RNAse8, RNAse2, RNAse6PL, RNAseL, RNAseT2, RNAse11, RNAseT2-like, NOB1, ENDOV, ENDOG, ENDOD1, hFEN1, hSLFN14, hLACTB2, APEX2, ANG, HRSP12, ZC3H12A, RIDA, PDL6, NTHL, KIAA0391, APEX1, AGO2, EXOG, ZC3H12D, ERN2, PELO, YBEY, CPSF4L, hCG_2002731, ERCC1, RAC1, RAA1, RAB1, DNA2, FLJ35220, FLJ13173, ERCC4, Rnase1(K41R), Rnase1(K41R, D121E), Rnase1(K41R, D121E, H119N), Rnase1(H119N), Rnase1(R39D, N67D, N88A, G89D, R91D, H119N), Rnase1(R39D, N67D, N88A, G89D, R91D, H119N, K41R, D121E), Rnase1(R39D, N67D, N88A, G89D, R91D), TENM1, TENM2, RNAseK, TALEN, ZNF638, and hSMG6. In one embodiment, the second RNA-binding polypeptide is ZC3H12A.

[0019] In some embodiments of the compositions of the disclosure, the sequence comprising the gRNA further comprises a sequence encoding a promoter capable of expressing the gRNA in a eukaryotic cell.

[0020] In some embodiments of the compositions of the disclosure, the gRNA comprises a spacer sequence comprising ACATGTAGATGACAAAAGACTCGTTG (SEQ ID NO: 465), TGAAGATGTAGAATGCCACGCTGGCG (SEQ ID NO: 409), or ACTGCTTGTTCATCATGATATAGATG (SEQ ID NO: 466).

[0021] In some embodiments of the compositions of the disclosure, the eukaryotic cell is an animal cell. In some embodiments, the animal cell is a mammalian cell. In some embodiments, the animal cell is a human cell.

[0022] In some embodiments of the compositions of the disclosure, the promoter is a constitutively active promoter. In some embodiments, the promoter sequence is isolated or derived from a promoter capable of driving expression of an RNA polymerase. In some embodiments, the promoter sequence is a Pol II promoter. In some embodiments, the promoter sequence is isolated or derived from a U6 promoter. In some embodiments, the promoter is a sequence isolated or derived from a promoter capable of driving expression of a transfer RNA (tRNA). In some embodiments, the promoter is isolated or derived from an alanine tRNA promoter, an arginine tRNA promoter, an asparagine tRNA promoter, an aspartic acid tRNA promoter, a cysteine tRNA promoter, a glutamine tRNA promoter, a glutamic acid tRNA promoter, a glycine tRNA promoter, a histidine tRNA promoter, an isoleucine tRNA promoter, a leucine tRNA promoter, a lysine tRNA promoter, a methionine tRNA promoter, a phenylalanine tRNA promoter, a proline tRNA promoter, a serine tRNA promoter, a threonine tRNA promoter, a tryptophan tRNA promoter, a tyrosine tRNA promoter, or a valine tRNA promoter. In some embodiments, the promoter is isolated or derived from a valine tRNA promoter.

[0023] In some embodiments of the compositions of the disclosure, the sequence comprising the gRNA further comprises a spacer sequence that specifically binds to the target RNA sequence. In some embodiments, the spacer sequence has at least 50%, 55%, 60%, 65%, 70%, 75%, 80%, 87%, 90%, 95%, 97%, 99% or any percentage in between of complementarity to the target RNA sequence. In some embodiments, the spacer sequence has 100% complementarity to the target RNA sequence. In some embodiments, the spacer sequence comprises or consists of 20 nucleotides. In some embodiments, the spacer sequence comprises or consists of 21 nucleotides, 22 nucleotides, 23 nucleotides, 24 nucleotides, 25 nucleotides, 26 nucleotides, 27 nucleotides, 28 nucleotides, or 29 nucleotides. In some embodiments, the spacer sequence comprises or consists of 26 nucleotides. In some embodiments, the spacer sequence is non-processed and comprises or consists of 30 nucleotides. In some embodiments the non-processed spacer sequence comprises or consists of 30-36 nucleotides.

[0024] In some embodiments of the compositions of the disclosure, the sequence comprising the gRNA further comprises a spacer sequence that specifically binds to the target RNA sequence. In some embodiments, the spacer sequence has at least 50%, 55%, 60%, 65%, 70%, 75%, 80%, 87%, 90%, 95%, 97%, 99% or any percentage in between of complementarity to the target RNA sequence.

[0025] In some embodiments of the compositions of the disclosure, the sequence comprising the gRNA further comprises a spacer sequence that specifically binds to the target RNA sequence. In some embodiments, the spacer sequence has at least 50%, 55%, 60%, 65%, 70%, 75%, 80%, 87%, 90%, 95%, 97%, 99% or any percentage in between of complementarity to the target RNA sequence.

[0026] In some embodiments of the compositions of the disclosure, the gRNA does not bind or does not selectively bind to a second sequence within the RNA molecule.

[0027] In some embodiments of the compositions of the disclosure, an RNA genome or an RNA transcriptome comprises the RNA molecule.

[0028] In some embodiments of the compositions of the disclosure, the first RNA binding protein comprises a CRISPR-Cas protein. In some embodiments, the CRISPR-Cas protein is a Type II CRISPR-Cas protein. In some embodiments, the first RNA binding protein comprises a Cas9 polypeptide or an RNA-binding portion thereof. In some embodiments, the CRISPR-Cas protein comprises a native RNA nuclease activity. In some embodiments, the native RNA nuclease activity is reduced or inhibited. In some embodiments, the native RNA nuclease activity is increased or induced. In some embodiments, the CRISPR-Cas protein comprises a native DNA nuclease activity and the native DNA nuclease activity is inhibited. In some embodiments, the CRISPR-Cas protein comprises a mutation. In some embodiments, a nuclease domain of the CRISPR-Cas protein comprises the mutation. In some embodiments, the mutation occurs in a nucleic acid encoding the CRISPR-Cas protein. In some embodiments, the mutation occurs in an amino acid encoding the CRISPR-Cas protein. In some embodiments, the mutation comprises a substitution, an insertion, a deletion, a frameshift, an inversion, or a transposition. In some embodiments, the mutation comprises a deletion of a nuclease domain, a binding site within the nuclease domain, an active site within the nuclease domain, or at least one essential amino acid residue within the nuclease domain.

[0029] In some embodiments, the pathogenic RNA comprises the target RNA, and/or the target RNA is associated with the pathogenic RNA. In some embodiments, the pathogenic RNA encodes gain-or-loss-of-function mutations.

[0030] In some embodiments of the compositions of the disclosure, the RNA binding protein comprises a CRISPR-Cas protein. In some embodiments, the CRISPR-Cas protein is a Type V CRISPR-Cas protein. In some embodiments, the RNA binding protein comprises a Cpf1 polypeptide or an RNA-binding portion thereof. In some embodiments, the CRISPR-Cas protein comprises a native RNA nuclease activity. In some embodiments, the native RNA nuclease activity is reduced or inhibited. In some embodiments, the native RNA nuclease activity is increased or induced. In some embodiments, the CRISPR-Cas protein comprises a native DNA nuclease activity and the native DNA nuclease activity is inhibited. In some embodiments, the CRISPR-Cas protein comprises a mutation. In some embodiments, a nuclease domain of the CRISPR-Cas protein comprises the mutation. In some embodiments, the mutation occurs in a nucleic acid encoding the CRISPR-Cas protein. In some embodiments, the mutation occurs in an amino acid encoding the CRISPR-Cas protein. In some embodiments, the mutation comprises a substitution, an insertion, a deletion, a frameshift, an inversion, or a transposition. In some embodiments, the mutation comprises a deletion of a nuclease domain, a binding site within the nuclease domain, an active site within the nuclease domain, or at least one essential amino acid residue within the nuclease domain.

[0031] In some embodiments of the compositions of the disclosure, the RNA binding protein comprises a CRISPR-Cas protein. In some embodiments, the CRISPR-Cas protein is a Type VI CRISPR-Cas protein. In some embodiments, the RNA binding protein comprises a Cas13 polypeptide or an RNA-binding portion thereof. In some embodiments, the RNA binding protein comprises a Cas13d polypeptide or an RNA-binding portion thereof. In some embodiments, the CRISPR-Cas protein comprises a native RNA nuclease activity. In some embodiments, the native RNA nuclease activity is reduced or inhibited. In some embodiments, the native RNA nuclease activity is increased or induced. In some embodiments, the CRISPR-Cas protein comprises a native DNA nuclease activity and the native DNA nuclease activity is inhibited. In some embodiments, the CRISPR-Cas protein comprises a mutation. In some embodiments, a nuclease domain of the CRISPR-Cas protein comprises the mutation. In some embodiments, the mutation occurs in a nucleic acid encoding the CRISPR-Cas protein. In some embodiments, the mutation occurs in an amino acid encoding the CRISPR-Cas protein. In some embodiments, the mutation comprises a substitution, an insertion, a deletion, a frameshift, an inversion, or a transposition. In some embodiments, the mutation comprises a deletion of a nuclease domain, a binding site within the nuclease domain, an active site within the nuclease domain, or at least one essential amino acid residue within the nuclease domain.

[0032] In some embodiments of the compositions of the disclosure, the RNA binding protein is a non-guided RNA binding protein. In some embodiments, the non-guided RNA binding protein comprises a Pumilio and FBF (PUF) protein or an RNA binding portion thereof. In some embodiments, the RNA binding protein comprises a Pumilio-based assembly (PUMBY) protein or an RNA binding portion thereof.

[0033] In some embodiments of the compositions of the disclosure, the RNA binding protein does not require multimerization for RNA-binding activity. In some embodiments, the RNA binding protein is not a monomer of a multimer complex. In some embodiments, a multimer protein complex does not comprise the RNA binding protein.

[0034] In some embodiments of the compositions of the disclosure, the RNA binding protein selectively binds to a target sequence within the RNA molecule. In some embodiments, the RNA binding protein does not comprise an affinity for a second sequence within the RNA molecule. In some embodiments, the RNA binding protein does not comprise a high affinity for or selectively bind a second sequence within the RNA molecule.

[0035] In some embodiments of the compositions of the disclosure, an RNA genome or an RNA transcriptome comprises the RNA molecule.

[0036] In some embodiments of the compositions of the disclosure, the RNA binding protein comprises between 2 and 1300 amino acids, inclusive of the endpoints.

[0037] In some embodiments of the compositions of the disclosure, the sequence encoding the RNA binding protein further comprises a sequence encoding a nuclear localization signal (NLS), a nuclear export signal (NES) or tag. In some embodiments, the sequence encoding a nuclear localization signal (NLS) is positioned at the N-terminus of the sequence encoding the RNA binding protein. In some embodiments, the RNA binding protein comprises an NLS at a C-terminus of the protein.

[0038] In some embodiments of the compositions of the disclosure, the sequence encoding the RNA binding protein further comprises a first sequence encoding a first NLS and a second sequence encoding a second NLS. In some embodiments, the sequence encoding the first NLS or the second NLS is positioned at the N-terminus of the sequence encoding the RNA binding protein. In some embodiments, the RNA binding protein comprises the first NLS or the second NLS at a C-terminus of the protein.

[0039] In some embodiments of the compositions of the disclosure, the composition further comprises a second RNA binding protein. In some embodiments, the second RNA binding protein comprises or consists of a nuclease domain. In some embodiments, the second RNA binding protein binds RNA in a manner in which it associates with RNA. In some embodiments, the second RNA binding protein associates with RNA in a manner in which it cleaves RNA. In some embodiments of the compositions of the disclosure, the sequence encoding the second RNA binding protein comprises or consists of an RNAse.

[0040] In some embodiments, the compositions of the disclosure are used in methods for treating a subject in need thereof, the methods comprising contacting a target RNA with a nucleic acid sequence encoding the knockdown RNA and replacement protein.

[0041] In some embodiments of the compositions disclosed herein are used in a method for reducing the level of expression of a pathogenic target RNA molecule or a protein encoded by the pathogenic RNA molecule and replacing gain-or-loss-of-function mutations caused by the pathogenic target RNA with a therapeutic replacement protein, the method comprising contacting the compositions disclosed herein and the pathogenic target RNA molecule comprising a target RNA sequence under conditions suitable for binding of the RNA binding protein to the target RNA sequence, wherein the level of expression of the pathogenic target RNA is reduced, and wherein the expression of the pathogenic target RNA is replaced with expression of a therapeutic replacement protein.

### BRIEF DESCRIPTION OF THE DRAWINGS

[0042] The patent or application file contains at least one drawing executed in color. Copies of this patent or patent application publication with color drawing(s) will be provided by the Office upon request and payment of the necessary fee.

[0043] FIGS. 1A-1E are schematic diagrams of exemplary embodiments of compositions of the disclosure that depict nucleic acid sequence designs that promote simultaneous knockdown and replacement of pathogenic RNAs. Nucleic acid sequences A-E each describe exemplary vector sequences. In these embodiments, a polymerase II (“Pol II”) promoter drives expression of the RNA-targeting protein and a polymerase III promoter (“Pol III”) drives expression of the optional single guide RNA (“sgRNA”) in vectors that also encode a CRISPR-associated (Cas) RNA-targeting protein. The replacement protein is provided either by a second polymerase II promoter or via the same promoter that drives the RNA-targeting protein. In the case of a single polymerase II promoter system, the replacement gene and the RNA knockdown system are separated by either a 2A site or an internal ribosome entry site (IRES).

[0044] FIG. 2 is a schematic diagram of embodiments of therapeutic compositions and methods of the disclosure involving the knockdown and replace vector. Certain schematic vector designs are packaged in a delivery vehicle such as adeno-associated virus (AAV) and delivered to target tissue in a manner determined by AAV serotype and administration method. Once present in the target tissue, the therapeutic simultaneously replaces the mutated RNA and encoded protein while destroying the mutated RNA.

[0045] FIG. 3 is a plasmid map showing an exemplary configuration of pmirGlo designed for a luciferase reporter assay for detecting knockdown effect of the compositions disclosed herein.

[0046] FIG. 4 is a plasmid map showing a PUMBY-based knockdown and replacement embodiment of the compositions disclosed herein.

[0047] FIG. 5 is a plasmid map showing a PUF-based knockdown and replacement embodiment of the compositions disclosed herein

[0048] FIG. 6A-6C show embodiments of the compositions disclosed herein. FIG. 6A shows a schematic diagram of exemplary embodiments of compositions of the disclosure that depict nucleic acid sequence designs encoding PUF or PUMBY-based RNA-binding-effector fusion proteins. FIGS. 6B-6C show knockdown of Rhodopsin target RNA and replacement of the target RNA with “hardened” rhodopsin.

[0049] FIGS. 7A-7B show knockdown of Rhodopsin target RNA and replacement of the target RNA with “hardened” rhodopsin.

[0050] FIG. 8 shows a luciferase assay PUF-targeting Rhodopsin knockdown screen compared to no targeting.

### DETAILED DESCRIPTION

[0051] The disclosure provides a therapeutic combination of RNA-targeting and gene replacement. In particular, the disclosure provides compositions and methods for specifically targeting and knocking down pathogenic RNA molecules which lead to toxic gain-or-loss-of-function mutations in a sequence-specific manner while also replacing the targeted, and knocked down, gene with the corresponding therapeutic gene. In one embodiment, the pathogenic RNA comprises a target RNA sequence. In one embodiment, the pathogenic RNA comprises a target RNA sequence but the target RNA sequence does not comprise the gain-or-loss-of-function mutations. In another embodiment, the target RNA is in non-coding RNA. In a further embodiment, the pathogenic RNA comprises one or more additional target RNAs. In particular, the disclosure provides a composition comprising a nucleic acid sequence encoding a target RNA knockdown and replacement therapeutic comprising (a) an RNA-binding polypeptide or portion thereof, and (b) a therapeutic protein, wherein the RNA-binding polypeptide binds and cleaves a target RNA, wherein a pathogenic RNA comprises the target RNA, and wherein the therapeutic protein is a wild-type replacement of the pathogenic RNA or protein encoded by the pathogenic RNA. The disclosure provides vectors, compositions and cells comprising the knockdown and replacement compositions. The disclosure provides methods of using the knockdown and replacement systems, the RNA-guided (such as CRISPR/Cas-based) or non-RNA-guided (PUF or PUMBY-based) RNA-binding proteins fusions, guide RNAs (gRNAs) corresponding to RNA-guided CRISPR/Cas proteins, therapeutic replacement genes or portions thereof, vectors, compositions and cells of the disclosure to treat a disease or disorder. The compositions also provide particular target RNA sequences or particular targeting RNA sequences (e.g., a particular gRNA spacer sequence).

[0052] The compositions and methods of the disclosure provide a combined knockdown and therapeutic effect. Accordingly, the compositions comprise a nucleic acid sequence encoding 1) an RNA-binding polypeptide (RBP) or RNA-binding domain (RBD), capable of cleavage of a pathogenic RNA comprising a target RNA sequence, and 2) a replacement therapeutic protein. In some embodiments, the replacement therapeutic protein is the wild-type protein of the pathogenic target RNA or protein. In some embodiments, the therapeutic (e.g., wild-type) replacement protein replaces gain-or-loss-of-function mutations encoded by the pathogenic target RNA.

[0053] In some embodiments, the RNA-binding polypeptide is an RNA-guided RNA-binding polypeptide. In some embodiments, the RNA-guided RNA-binding polypeptide is a CRISPR/Cas protein and the nucleic acid sequence further comprises an gRNA sequence which corresponds to the target RNA and the CRISPR/Cas protein. In some embodiments, the RNA-binding polypeptide is not an RNA-guided RNA-binding polypeptide. In particular embodiments, the non-RNA-guided RNA-binding polypeptide is a PUF protein or a PUMBY protein or portion thereof. In some embodiments, the pathogenic RNA comprising the target RNA encodes gain-or-loss-of-function mutations.

[0054] In some embodiments, the pathogenic RNA encodes gain-or-loss-of-function mutations in the rhodopsin gene and the replacement gene encodes human rhodopsin. In some embodiments, the pathogenic rhodopsin RNA comprises a rhodopsin target RNA. In one embodiment, the rhodopsin target RNA sequence comprises GCCAGCGTGGCATTCTACATCTTC (SEQ ID NO: 406). In some embodiments, the rhodopsin target RNA comprises CAACGAGTCTTTTGTCATCTACATGT (SEQ ID NO: 462), CGCCAGCGTGGCATTCTACATCTTCA (SEQ ID NO: 463), or CATCTATATCATGATGAACAAGCAGT (SEQ ID NO: 464).

[0055] In another embodiment, the rhodopsin target RNA encodes an amino acid comprising ASVAFYIF (SEQ ID NO: 407). In one embodiment, the rhodopsin target RNA encodes an amino acid comprising ASVAFYIF (SEQ ID NO: 407) at e.g., position 269 to 276. In another embodiment, the target RNA encodes an amino acid comprising YASVAFYIFT (SEQ ID NO: 486). In another embodiment, the target RNA encodes an amino acid comprising YASVAFYIFT (SEQ ID NO: 486) at e.g., positions 268 to 277.

[0056] In some embodiments, the replacement gene encodes “hardened” rhodopsin. “Hardened” rhodopsin is an engineered wild-type rhodopsin the expression of which is engineered to be incapable of knockdown using the compositions disclosed herein. In one embodiment, a “hardened” rhodopsin nucleic acid sequence comprising at least one mismatch. In another embodiment, a “hardened” rhodopsin nucleic acid sequence comprising two or more mismatches. In one embodiment, the “hardened” rhodopsin is encoded by a nucleic acid sequence which does not comprise the rhodopsin target RNA comprising GCCAGCGTGGCATTCTACATCTTC SEQ ID NO: 406. In another embodiment, the “hardened” rhodopsin is encoded by a nucleic acid sequence comprising GCTTCCGTAGCTTTTTATATTTTT (SEQ ID NO: 408). In some embodiments, the spacer sequence of the gRNA is a sequence which is complementary to the rhodopsin target RNA. In one embodiment, the spacer sequence targeting the rhodopsin target RNA is ACATGTAGATGACAAAAGACTCGTTG (SEQ ID NO: 465), TGAAGATGTAGAATGCCACGCTGGCG (SEQ ID NO: 409), or ACTGCTTGTTCATCATGATATAGATG (SEQ ID NO 466).

### Guide RNAs

[0057] The terms guide RNA (gRNA) and single guide RNA (sgRNA) are used interchangeably throughout the disclosure.

[0058] Guide RNAs (gRNAs) of the disclosure may comprise of a spacer sequence and a scaffolding and/or a “direct repeat” (DR) sequence. In some embodiments, a guide RNA is a single guide RNA (sgRNA) comprising a contiguous spacer sequence and scaffolding sequence. In some embodiments, the spacer sequence and the scaffolding sequence are not contiguous. In some embodiments, a scaffold sequence comprises a “direct repeat” (DR) sequence. In some embodiments, the gRNA comprises a DR sequence. DR sequences refer to the repetitive sequences in the CRISPR locus (naturally-occurring in a bacterial genome or plasmid) that are interspersed with the spacer sequences. It is well known that one would be able to infer the DR sequence of a corresponding Cas protein if the sequence of the associated CRISPR locus is known. In some embodiments, a guide RNA comprises a direct repeat (DR) sequence and a spacer sequence. In some embodiments, a sequence encoding a guide RNA or single guide RNA of the disclosure comprises or consists of a spacer sequence and a scaffolding sequence and/or a DR sequence, that are separated by a linker sequence. In some embodiments, the linker sequence may comprise or consist of 1, 2, 3, 4, 5, 6, 7, 8, 9, 10, 15, 20, 25, 30, 35, 40, 45, 50 or any number of nucleotides in between. In some embodiments, the linker sequence may comprise at least 1, 2, 3, 4, 5, 6, 7, 8, 9, 10, 15, 20, 25, 30, 35, 40, 45, 50 or any number of nucleotides in between. In some embodiments, the scaffold sequence is a Cas9 scaffold sequence. In some embodiments, the DR sequence is a Cas13d sequence.

[0059] In one embodiment, the gRNA that hybridizes with the one or more target RNA molecules in a Cas 13d-mediated manner includes one or more direct repeat (DR) sequences, one or more spacer sequences, such as, e.g., one or more sequences comprising an array of DR-spacer-DR-spacer. In one embodiment, a plurality of gRNAs are generated from a single array, wherein each gRNA can be different, for example target different RNAs or target multiple regions of a single RNA, or combinations thereof. In some embodiments, an isolated gRNA includes one or more direct repeat (DR) sequences, such as an unprocessed (e.g., about 36 nt) or processed DR (e.g., about 30 nt). In some embodiments, a gRNA can further include one or more spacer sequences specific for (e.g., is complementary to) the target RNA. In certain such embodiments, multiple pol III promoters can be used to drive multiple gRNAs, spacers and/or DRs. In one embodiment, a guide array comprises a DR (about 36nt)-spacer (about 30nt)-DR (about 36nt)-spacer (about 30nt)-DR (about 36nt).

[0060] Guide RNAs (gRNAs) of the disclosure may comprise non-naturally occurring nucleotides. In some embodiments, a guide RNA of the disclosure or a sequence encoding the guide RNA comprises or consists of modified or synthetic RNA nucleotides. Exemplary modified RNA nucleotides include, but are not limited to, pseudouridine (Ψ), dihydrouridine (D), inosine (I), and 7-methylguanosine (m7G), hypoxanthine, xanthine, xanthosine, 7-methylguanine, 5, 6-Dihydrouracil, 5-methylcytosine, 5-methylcytidine, 5-hydropxymethylcytosine, isoguanine, and isocytosine.

[0061] Guide RNAs (gRNAs) of the disclosure may bind modified RNA within a target sequence. Within a target sequence, guide RNAs (gRNAs) of the disclosure may bind modified or mutated (e.g., pathogenic) RNA. Exemplary epigenetically or post-transcriptionally modified RNA include, but are not limited to, 2′-O-Methylation (2′-OMe) (2′-O-methylation occurs on the oxygen of the free 2′-OH of the ribose moiety), N6-methyladenosine (m6A), and 5-methylcytosine (m5C).

[0062] In some embodiments of the compositions of the disclosure, a guide RNA of the disclosure comprises at least one sequence encoding a non-coding C/D box small nucleolar RNA (snoRNA) sequence. In some embodiments, the snoRNA sequence comprises at least one sequence that is complementary to the target RNA, wherein the target sequence of the RNA molecule comprises at least one 2′-OMe. In some embodiments, the snoRNA sequence comprises at least one sequence that is complementary to the target RNA, wherein the at least one sequence that is complementary to the target RNA comprises a box C motif (RUGAUGA) and a box D motif (CUGA).

[0063] Spacer sequences of the disclosure bind to the target sequence of an RNA molecule. In some embodiments, spacer sequences of the disclosure bind to pathogenic target RNA.

[0064] Spacer sequences of the disclosure may comprise a CRISPR RNA (crRNA). Spacer sequences of the disclosure comprise or consist of a sequence having sufficient complementarity to a target sequence of an RNA molecule to bind selectively to the target sequence. Upon binding to a target sequence of an RNA molecule, the spacer sequence may guide one or more of a scaffolding sequence and a fusion protein to the RNA molecule. In some embodiments, a sequence having sufficient complementarity to a target sequence of an RNA molecule to bind selectively to the target sequence has at least 50%, 55%, 60%, 65%, 70%, 75%, 80%, 85%, 90%, 95%, 96, 97%, 98%, 99%, or any percentage identity in between to the target sequence. In some embodiments, a sequence having sufficient complementarity to a target sequence of an RNA molecule to bind selectively to the target sequence has 100% identity the target sequence.

[0065] Scaffolding sequences of the disclosure bind the first RNA-binding polypeptide of the disclosure. Scaffolding sequences of the disclosure may comprise a trans acting RNA (tracrRNA). Scaffolding sequences of the disclosure comprise or consist of a sequence having sufficient complementarity to a target sequence of an RNA molecule to bind selectively to the target sequence. Upon binding to a target sequence of an RNA molecule, the scaffolding sequence may guide a fusion protein to the RNA molecule. In some embodiments, a sequence having sufficient complementarity to a target sequence of an RNA molecule to bind selectively to the target sequence has at least 50%, 55%, 60%, 65%, 70%, 75%, 80%, 85%, 90%, 95%, 96, 97%, 98%, 99%, or any percentage identity in between to the target sequence. In some embodiments, a sequence having sufficient complementarity to a target sequence of an RNA molecule to bind selectively to the target sequence has 100% identity the target sequence. Alternatively, or in addition, in some embodiments, scaffolding sequences of the disclosure comprise or consist of a sequence that binds to a first RNA binding protein or a second RNA binding protein of a fusion protein of the disclosure. In some embodiments, scaffolding sequences of the disclosure comprise a secondary structure or a tertiary structure. Exemplary secondary structures include, but are not limited to, a helix, a stem loop, a bulge, a tetraloop and a pseudoknot. Exemplary tertiary structures include, but are not limited to, an A-form of a helix, a B-form of a helix, and a Z-form of a helix. Exemplary tertiary structures include, but are not limited to, a twisted or helicized stem loop. Exemplary tertiary structures include, but are not limited to, a twisted or helicized pseudoknot. In some embodiments, scaffolding sequences of the disclosure comprise at least one secondary structure or at least one tertiary structure. In some embodiments, scaffolding sequences of the disclosure comprise one or more secondary structure(s) or one or more tertiary structure(s).

[0066] In some embodiments of the compositions of the disclosure, a guide RNA or a portion thereof selectively binds to a tetraloop motif in an RNA molecule of the disclosure. In some embodiments, a target sequence of an RNA molecule comprises a tetraloop motif. In some embodiments, the tetraloop motif is a “GRNA” motif comprising or consisting of one or more of the sequences of GAAA, GUGA, GCAA or GAGA.

[0067] In some embodiments of the compositions of the disclosure, a guide RNA or a portion thereof that binds to a target sequence of an RNA molecule hybridizes to the target sequence of the RNA molecule. In some embodiments, a guide RNA or a portion thereof that binds to a first RNA binding protein or to a second RNA binding protein covalently binds to the first RNA binding protein or to the second RNA binding protein. In some embodiments, a guide RNA or a portion thereof that binds to a first RNA binding protein or to a second RNA binding protein non-covalently binds to the first RNA binding protein or to the second RNA binding protein.

[0068] In some embodiments of the compositions of the disclosure, a guide RNA or a portion thereof comprises or consists of between 10 and 100 nucleotides, inclusive of the endpoints. In some embodiments, a spacer sequence of the disclosure comprises or consists of between 10 and 30 nucleotides, inclusive of the endpoints. In some embodiments, a spacer sequence of the disclosure comprises or consists of 15, 16, 17, 18, 19, 20, 21, 22, 23, 24, 25, 26, 27, 28, 29 or 30 nucleotides. In some embodiments, the spacer sequence of the disclosure comprises or consists of 20 nucleotides. In some embodiments, the spacer sequence of the disclosure comprises or consists of 21 nucleotides. In some embodiments, the spacer sequence of the disclosure comprises or consists of 26 nucleotides.

[0069] Guide molecules generally exist in various states of processing. In one example, an unprocessed guide RNA is 36nt of DR followed by 30-32 nt of spacer. The guide RNA is processed (truncated/modified) by Cas 13d itself or other RNases into the shorter “mature” form. In some embodiments, an unprocessed guide sequence is about, or at least about 30, 35, 40, 45, 50, 55, 60, 61, 62, 63, 64, 65, 66, 67, 68, 69, 70, 71, 72, 73, 74, 75, or more nucleotides (nt) in length. In some embodiments, a processed guide sequence is about 44 to 60 nt (such as 40, 41, 42, 43, 44, 45, 46, 47, 48, 49, 50, 51, 52, 53, 54, 55, 56, 57, 58, 59, 60, 61, 62, 63, 64, 65, 66, 67, 68, 69, or 70 nt). In some embodiments, an unprocessed spacer is about 28-32 nt long (such as 25, 26, 27, 28, 29, 30, 31, 32, 33, 34, or 35 nt) while the mature (processed) spacer can be about 10 to 30 nt, 10 to 25 nt, 14 to 25 nt, 20 to 22 nt, or 14-30 nt (such as 10, 11, 12, 13, 14, 15, 16, 17, 18, 19, 20, 21, 22, 23, 24, 25, 26, 27, 28, 29, 30, 31, 32, 33, 34, or 35 nt). In some embodiments, an unprocessed DR is about 36 nt (such as 30, 31, 32, 33, 34, 35, 36, 37, 38, 39, 40 or 41 nt), while the processed DR is about 30 nt (such as 25, 26, 27, 28, 29, 30, 31, 32, 33, 34, or 35 nt). In some embodiments, a DR sequence is truncated by 1-10 nucleotides (such as 1, 2, 3, 4, 5, 6, 7, 8, 9, or 10 nucleotides at e.g., the 5′ end in order to be expressed as mature pre-processed guide RNAs.

[0070] In some embodiments, a scaffold sequence, such as e.g., a Cas9 scaffold sequence, of the disclosure comprises or consists of between 10 and 100 nucleotides, inclusive of the endpoints. In some embodiments, a scaffold sequence of the disclosure comprises or consists of 30, 35, 40, 45, 50, 55, 60, 65, 70, 76, 80, 87, 90, 95, 100 or any number of nucleotides in between. In some embodiments, the scaffold sequence of the disclosure comprises or consists of between 85 and 95 nucleotides, inclusive of the endpoints. In some embodiments, the scaffold sequence of the disclosure comprises or consists of 85 nucleotides. In some embodiments, the scaffold sequence of the disclosure comprises or consists of 90 nucleotides. In some embodiments, the scaffold sequence of the disclosure comprises or consists of 93 nucleotides. In some embodiments of the compositions of the disclosure, the sequence comprising the gRNA further comprises a scaffold sequence that specifically binds to the first RNA binding protein. In some embodiments, the scaffold sequence comprises a stem-loop structure. In some embodiments, the scaffold sequence comprises or consists of 90 nucleotides. In some embodiments, the scaffold sequence comprises or consists of 93 nucleotides. In some embodiments, the scaffold sequence comprises or consists of the sequence GUUUAAGAGCUAUGCUGGAAACAGCAUAGCAAGUUUAAAUAAGGCUAGUCCGUU AUCAACUUGAAAAAGUGGCACCGAGUCGGUGCUUUUUUU (SEQ ID NO: 403). In some embodiments, the scaffold sequence comprises or consists of the sequence GGACAGCAUAGCAAGUUAAAAUAAGGCUAGUCCGUUAUCAACUUGAAAAAGUGG CACCGAGUCGGUGCUUUUU (SEQ ID NO: 404). In some embodiments, the scaffold sequence comprises or consists of the sequence GUUUUAGAGCUAGAAAUAGCAAGUUAAAAUAAGGCUAGUCCGUUAUCAACUUGA AAAAGUGGCACCGAGUCGGUGCUUUUUUU (SEQ ID NO: 405).

[0071] In some embodiments of the compositions of the disclosure, a guide RNA or a portion thereof does not comprise a nuclear localization sequence (NLS).

[0072] In some embodiments of the compositions of the disclosure, a guide RNA or a portion thereof does not comprise a sequence complementary to a protospacer adjacent motif (PAM).

[0073] Therapeutic or pharmaceutical compositions of the disclosure do not comprise a PAMmer oligonucleotide. In other embodiments, optionally, non-therapeutic or non-pharmaceutical compositions may comprise a PAMmer oligonucleotide. The term “PAMmer” refers to an oligonucleotide comprising a PAM sequence that is capable of interacting with a guide nucleotide sequence-programmable RNA binding protein. Non-limiting examples of PAMmers are described in O'Connell et al. Nature 516, pages 263-266 (2014), incorporated herein by reference. A PAM sequence refers to a protospacer adjacent motif comprising about 2 to about 10 nucleotides. PAM sequences are specific to the guide nucleotide sequence-programmable RNA binding protein with which they interact and are known in the art. For example, Streptococcus pyogenes PAM has the sequence 5′-NGG-3′, where “N” is any nucleobase followed by two guanine (“G”) nucleobases. Cas9 of Francisella novicida recognizes the canonical PAM sequence 5′-NGG-3′, but has been engineered to recognize the PAM 5′-YG-3′ (where “Y” is a pyrimidine), thus adding to the range of possible Cas9 targets. The Cpf1 nuclease of Francisella novicida recognizes the PAM 5′-TTTN-3′ or 5′-YTN-3′.

[0074] In some embodiments of the compositions of the disclosure, a guide RNA or a portion thereof comprises a sequence complementary to a protospacer flanking sequence (PFS). In some embodiments, including those wherein a guide RNA or a portion thereof comprises a sequence complementary to a PFS, the first RNA binding protein may comprise a sequence isolated or derived from a Cas13 protein. In some embodiments, including those wherein a guide RNA or a portion thereof comprises a sequence complementary to a PFS, the first RNA binding protein may comprise a sequence encoding a Cas13 protein or an RNA-binding portion thereof. In some embodiments, the guide RNA or a portion thereof does not comprise a sequence complementary to a PFS.

[0075] In some embodiments of the compositions of the disclosure, guide RNA sequence of the disclosure comprises a promoter sequence to drive expression of the guide RNA. In some embodiments, a vector comprising a guide RNA sequence of the disclosure comprises a promoter sequence to drive expression of the guide RNA. In some embodiments, the promoter to drive expression of the guide RNA is a constitutive promoter. In some embodiments, the promoter sequence is an inducible promoter. In some embodiments, the promoter is a sequence is a tissue-specific and/or cell-type specific promoter. In some embodiments, the promoter is a hybrid or a recombinant promoter. In some embodiments, the promoter is a promoter capable of expressing the guide RNA in a mammalian cell. In some embodiments, the promoter is a promoter capable of expressing the guide RNA in a human cell. In some embodiments, the promoter is a promoter capable of expressing the guide RNA and restricting the guide RNA to the nucleus of the cell. In some embodiments, the promoter is a human RNA polymerase promoter or a sequence isolated or derived from a sequence encoding a human RNA polymerase promoter. In some embodiments, the promoter is a U6 promoter or a sequence isolated or derived from a sequence encoding a U6 promoter. In some embodiments, the promoter is a human tRNA promoter or a sequence isolated or derived from a sequence encoding a human tRNA promoter. In some embodiments, the promoter is a human valine tRNA promoter or a sequence isolated or derived from a sequence encoding a human valine tRNA promoter.

[0076] In some embodiments of the compositions of the disclosure, a promoter to drive expression of the guide RNA further comprises a regulatory element. In some embodiments, a vector comprising a promoter sequence to drive expression of the guide RNA further comprises a regulatory element. In some embodiments, a regulatory element enhances expression of the guide RNA. Exemplary regulatory elements include, but are not limited to, an enhancer element, an intron, an exon, or a combination thereof.

[0077] In some embodiments of the compositions of the disclosure, a vector of the disclosure comprises one or more of a sequence encoding a guide RNA, a promoter sequence to drive expression of the guide RNA and a sequence encoding a regulatory element. In some embodiments of the compositions of the disclosure, the vector further comprises a sequence encoding a fusion protein of the disclosure.

[0078] In some embodiments of the compositions of the disclosure, gRNAs correspond to target RNA molecules and an RNA-guided RNA binding protein. In some embodiments, the gRNAs correspond to an RNA-guided RNA binding fusion protein, wherein the fusion protein comprises first and second RNA binding proteins. In some embodiments, along a sequence encoding the RNA-binding fusion protein, the sequence encoding the first RNA binding protein is positioned 5′ of the sequence encoding the second RNA binding protein. In some embodiments, along a sequence encoding the fusion protein, the sequence encoding the first RNA binding protein is positioned 3′ of the sequence encoding the second RNA binding protein.

[0079] In some embodiments of the compositions of the disclosure, the sequence encoding the first RNA binding protein comprises a sequence isolated or derived from a protein capable of binding an RNA molecule. In some embodiments, the sequence encoding the first RNA binding protein comprises a sequence isolated or derived from a protein capable of selectively binding an RNA molecule and not binding a DNA molecule, a mammalian DNA molecule or any DNA molecule. In some embodiments, the sequence encoding the first RNA binding protein comprises a sequence isolated or derived from a protein capable of binding an RNA molecule and inducing a break in the RNA molecule. In some embodiments, the sequence encoding the first RNA binding protein comprises a sequence isolated or derived from a protein capable of binding an RNA molecule, inducing a break in the RNA molecule, and not binding a DNA molecule, a mammalian DNA molecule or any DNA molecule. In some embodiments, the sequence encoding the first RNA binding protein comprises a sequence isolated or derived from a protein capable of binding an RNA molecule, inducing a break in the RNA molecule, and neither binding nor inducing a break in a DNA molecule, a mammalian DNA molecule or any DNA molecule.

[0080] In some embodiments of the compositions of the disclosure, the sequence encoding the first RNA binding protein comprises a sequence isolated or derived from a protein with no DNA nuclease activity.

[0081] In some embodiments of the compositions of the disclosure, the sequence encoding the first RNA binding protein comprises a sequence isolated or derived from a protein having DNA nuclease activity, wherein the DNA nuclease activity does not induce a break in a DNA molecule, a mammalian DNA molecule or any DNA molecule when a composition of the disclosure is contacted to an RNA molecule or introduced into a cell or into a subject of the disclosure.

[0082] In some embodiments of the compositions of the disclosure, the sequence encoding the first RNA binding protein comprises a sequence isolated or derived from a protein having DNA nuclease activity, wherein the DNA nuclease activity is inactivated and wherein the DNA nuclease activity does not induce a break in a DNA molecule, a mammalian DNA molecule or any DNA molecule when a composition of the disclosure is contacted to an RNA molecule or introduced into a cell or into a subject of the disclosure. In some embodiments, the sequence encoding the first RNA binding protein comprises a mutation that inactivates or decreases the DNA nuclease activity to a level at which the DNA nuclease activity does not induce a break in a DNA molecule, a mammalian DNA molecule or any DNA molecule when a composition of the disclosure is contacted to an RNA molecule or introduced into a cell or into a subject of the disclosure. In some embodiments, the sequence encoding the first RNA binding protein comprises a mutation that inactivates or decreases the DNA nuclease activity and the mutation comprises one or more of a substitution, inversion, transposition, insertion, deletion, or any combination thereof to a nucleic acid sequence or amino acid sequence encoding the first RNA binding protein or a nuclease domain thereof.

[0083] In some embodiments of the compositions of the disclosure, the sequence encoding the RNA-guided RNA binding protein disclosed herein comprises a sequence isolated or derived from a CRISPR Cas protein. In some embodiments, the CRISPR Cas protein comprises a Type II CRISPR Cas protein. In some embodiments, the Type II CRISPR Cas protein comprises a Cas9 protein. Exemplary Cas9 proteins of the disclosure may be isolated or derived from any species, including, but not limited to, a bacteria or an archaea. Exemplary Cas9 proteins of the disclosure may be isolated or derived from any species, including, but not limited to, Streptococcus pyogenes, Haloferax mediteranii, Mycobacterium tuberculosis, Francisella tularensis subsp. novicida, Pasteurella multocida, Neisseria meningitidis, Campylobacter jejune, Streptococcus thermophilus, Campylobacter lari CF89-12, Mycoplasma gallisepticum str. F, Nitratifractor salsuginis str. DSM 16511, Parvibaculum lavamentivorans, Roseburia intestinalis, Neisseria cinerea, a Gluconacetobacter diazotrophicus, an Azospirillum B510, a Sphaerochaeta globus str. Buddy, Flavobacterium columnare, Fluviicola taffensis, Bacteroides coprophilus, Mycoplasma mobile, Lactobacillus farciminis, Streptococcus pasteurianus, Lactobacillus johnsonii, Staphylococcus pseudintermedius, Filifactor alocis, Treponema denticola, Legionella pneumophila str. Paris, Sutterella wadsworthensis, Corynebacter diphtherias, Streptococcus aureus, and Francisella novicida.

[0084] Exemplary wild type S. pyogenes Cas9 proteins of the disclosure may comprise or consist of the amino acid sequence of

### SEQ ID NO: 416.

[0085] Nuclease inactivated S. pyogenes Cas9 proteins may comprise a substitution of an Alanine (A) for an Aspartic Acid (D) at position 10 and an alanine (A) for a Histidine (H) at position 840. Exemplary nuclease inactivated S. pyogenes Cas9 proteins of the disclosure may comprise or consist of the amino acid sequence (D10A and H840A bolded and underlined) of SEQ ID NO: 417.

[0086] Nuclease inactivated S. pyogenes Cas9 proteins may comprise deletion of a RuvC nuclease domain or a portion thereof, an HNH domain, a DNAse active site, a ββα-metal fold or a portion thereof comprising a DNAse active site or any combination thereof.

[0087] Other exemplary Cas9 proteins or portions thereof may comprise or consist of the following amino acid sequences.

[0088] In some embodiments the Cas9 protein can be S. pyogenes Cas9 and may comprise or consist of the amino acid sequence of SEQ ID NO: 418.

[0089] In some embodiments the Cas9 protein can be S. aureus Cas9 and may comprise or consist of the amino acid sequence of SEQ ID NO: 419.

[0090] In some embodiments the Cas9 protein can be S. thermophiles CRISPR1 Cas9 and may comprise or consist of the amino acid sequence of SEQ ID NO: 420.

[0091] In some embodiments the Cas9 protein can be N. meningitidis Cas9 and may comprise or consist of the amino acid sequence of SEQ ID NO: 421.

[0092] In some embodiments the Cas9 protein can be Parvibaculum. lavamentivorans Cas9 and may comprise or consist of the amino acid sequence of SEQ ID NO: 422.

[0093] In some embodiments the Cas9 protein can be Corynebacter diphtheria Cas9 and may comprise or consist of the amino acid sequence of SEQ ID NO: 423.

[0094] In some embodiments the Cas9 protein can be Streptococcus pasteurianus Cas9 and may comprise or consist of the amino acid sequence of SEQ ID NO: 424.

[0095] In some embodiments the Cas9 protein can be Neisseria cinerea Cas9 and may comprise or consist of the amino acid sequence of SEQ ID NO: 425.

[0096] In some embodiments the Cas9 protein can be Campylobacter lari Cas9 and may comprise or consist of the amino acid sequence of SEQ ID NO: 426.

[0097] In some embodiments the Cas9 protein can be T. denticola Cas9 and may comprise or consist of the amino acid sequence of SEQ ID NO: 427.

[0098] In some embodiments the Cas9 protein can be S. mutans Cas9 and may comprise or consist of the amino acid sequence of SEQ ID NO: 428.

[0099] In some embodiments the Cas9 protein can be S. thermophilus CRISPR 3 Cas9 and may comprise or consist of the amino acid sequence of SEQ ID NO: 429.

[0100] In some embodiments the Cas9 protein can be C. jejuni Cas9 and may comprise or consist of the amino acid sequence of SEQ ID NO: 430.

[0101] In some embodiments the Cas9 protein can be P. multocida Cas9 and may comprise or consist of the amino acid sequence of SEQ ID NO: 431.

[0102] In some embodiments the Cas9 protein can be F. novicida Cas9 and may comprise or consist of the amino acid sequence of SEQ ID NO: 432.

[0103] In some embodiments the Cas9 protein can be Lactobacillus buchneri Cas9 and may comprise or consist of the amino acid sequence of SEQ ID NO: 433.

[0104] In some embodiments the Cas9 protein can be Listeria innocua Cas9 and may comprise or consist of the amino acid sequence of SEQ ID NO: 434.

[0105] In some embodiments the Cas9 protein can be L. pneumophilia Cas9 and may comprise or consist of the amino acid sequence of SEQ ID NO: 435.

[0106] In some embodiments the Cas9 protein can be N. lactamica Cas9 and may comprise or consist of the amino acid sequence of SEQ ID NO: 436.

[0107] In some embodiments the Cas9 protein can be N. meningitides Cas9 and may comprise or consist of the amino acid sequence of SEQ ID NO: 437.

[0108] In some embodiments the Cas9 protein can be B. longum Cas9 and may comprise or consist of the amino acid sequence of SEQ ID NO: 438.

[0109] In some embodiments the Cas9 protein can be A. muciniphila Cas9 and may comprise or consist of the amino acid sequence of SEQ ID NO: 439.

[0110] In some embodiments the Cas9 protein can be O. laneus Cas9 and may comprise or consist of the amino acid sequence of SEQ ID NO: 440.

[0111] In some embodiments of the compositions of the disclosure, the sequence encoding the first RNA binding protein comprises a sequence isolated or derived from a CRISPR Cas protein or portion thereof. In some embodiments, the CRISPR Cas protein comprises a Type V CRISPR Cas protein. In some embodiments, the Type V CRISPR Cas protein comprises a Cpf1 protein. Exemplary Cpf1 proteins of the disclosure may be isolated or derived from any species, including, but not limited to, a bacteria or an archaea. Exemplary Cpf1 proteins of the disclosure may be isolated or derived from any species, including, but not limited to, Francisella tularensis subsp. novicida, Acidaminococcus sp. BV3L6 and Lachnospiraceae bacterium sp. ND2006. Exemplary Cpf1 proteins of the disclosure may be nuclease inactivated.

[0112] Exemplary wild type Francisella tularensis subsp. Novicida Cpf1 (FnCpf1) proteins of the disclosure may comprise or consist of the amino acid sequence of SEQ ID NO: 441.

[0113] Exemplary wild type Lachnospiraceae bacterium sp. ND2006 Cpf1 (LbCpf1) proteins of the disclosure may comprise or consist of the amino acid sequence of SEQ ID NO: 442.

[0114] Exemplary wild type Acidaminococcus sp. BV3L6 Cpf1 (AsCpf1) proteins of the disclosure may comprise or consist of the amino acid sequence of SEQ ID NO: 443.

[0115] In some embodiments of the compositions of the disclosure, the sequence encoding the RNA binding protein comprises a sequence isolated or derived from a CRISPR Cas protein. In some embodiments, the CRISPR Cas protein comprises a Type VI CRISPR Cas protein or portion thereof. In some embodiments, the Type VI CRISPR Cas protein comprises a Cas13 protein or portion thereof. Exemplary Cas13 proteins of the disclosure may be isolated or derived from any species, including, but not limited to, a bacteria or an archaea. Exemplary Cas13 proteins of the disclosure may be isolated or derived from any species, including, but not limited to, Leptotrichia wadei, Listeria seeligeri serovar 1/2b (strain ATCC 35967 DSM 20751 CIP 100100 SLCC 3954), Lachnospiraceae bacterium, Clostridium aminophilum DSM 10710, Carnobacterium gallinarum DSM 4847, Paludibacter propionicigenes WB4, Listeria weihenstephanensis FSL R9-0317, Listeria weihenstephanensis FSL R9-0317, bacterium FSL M6-0635 (Listeria newyorkensis), Leptotrichia wadei F0279, Rhodobacter capsulatus SB 1003, Rhodobacter capsulatus R121, Rhodobacter capsulatus DE442 and Corynebacterium ulcerans. Exemplary Cas13 proteins of the disclosure may be DNA nuclease inactivated. Exemplary Cas13 proteins of the disclosure include, but are not limited to, Cas13a, Cas13b, Cas13c, Cas13d and orthologs thereof. Exemplary Cas13b proteins of the disclosure include, but are not limited to, subtypes 1 and 2 referred to herein as Csx27 and Csx28, respectively.

[0116] Exemplary Cas13a proteins include, but are not limited to:

| Cas13a | Cas13a | | | |
|---|---|---|---|---|
| number | abbreviation | Organism name | Accession number | Direct Repeat sequence |
| Cas13a1 | LshCas13a | Leptotrichia | WP_018451595.1 | CCACCCCAATATCGAAGGGGACTAA |
| | | shahii | | AAC (SEQ ID NO: 444) |
| Cas13a2 | LwaCas13a | Leptotrichia | WP_021746774.1 | GATTTAGACTACCCCAAAAACGAAG |
| | | wadei | | GGGACTAAAAC (SEQ ID NO: |
| | | | | 445) |
| Cas13a3 | LseCas13a | Listeria seeligeri | WP_012985477.1 | GTAAGAGACTACCTCTATATGAAAG |
| | | | | AGGACTAAAAC (SEQ ID NO: |
| | | | | 446) |
| Cas13a4 | LbmCas13a | Lachnospiraceae | WP_044921188.1 | GTATTGAGAAAAGCCAGATATAGTT |
| | | bacterium | | GGCAATAGAC (SEQ ID NO: 447) |
| | | MA2020 | | |
| Cas13a5 | LbnCas13a | Lachnospiraceae | WP_022785443.1 | GTTGATGAGAAGAGCCCAAGATAG |
| | | bacterium | | AGGGCAATAAC (SEQ ID NO: |
| | | NK4A179 | | 448) |
| Cas13a6 | CamCas13a | [Clostridium] | WP 031473346.1 | GTCTATTGCCCTCTATATCGGGCTGT |
| | | aminophilum | | TCTCCAAAC (SEQ ID NO: 449) |
| | | DSM 10710 | | |
| Cas13a7 | CgaCas13a | Camobacterium | WP_034560163.1 | ATTAAAGACTACCTCTAAATGTAAG |
| | | gallinarum DSM | | AGGACTATAAC (SEQ ID NO: |
| | | 4847 | | 450) |
| Cas13a8 | Cga2Cas13a | Camobacterium | WP_034563842.1 | AATATAAACTACCTCTAAATGTAAG |
| | | gallinarum DSM | | AGGACTATAAC (SEQ ID NO: |
| | | 4847 | | 451) |
| Cas13a9 | Pprcas13a | Paludibacter | WP_013443710.1 | CTTGTGGATTATCCCAAAATTGAAG |
| | | propionicigenes | | GGAACTACAAC (SEQ ID NO: |
| | | WB4 | | 452) |
| Cas13a10 | LweCas13a | Listeria | WP_036059185.1 | GATTTAGAGTACCTCAAAATAGAAG |
| | | weihenstephanen | | AGGTCTAAAAC (SEQ ID NO: |
| | | sis FSL R9-0317 | | 453) |
| Cas13a11 | LbfCas13a | Listeriaceae | WP_036091002.1 | GATTTAGAGTACCTCAAAACAAAAG |
| | | bacterium FSL | | AGGACTAAAAC (SEQ ID NO: |
| | | M6-0635 | | 454) |
| | | (Listeria | | |
| | | newyorkensis) | | |
| Cas13a12 | Lwa2cas13a | Leptotrichia | WP_021746774.1 | GATATAGATAACCCCAAAAACGAA |
| | | wadei F0279 | | GGGATCTAAAAC (SEQ ID NO: |
| | | | | 455) |
| Cas13a13 | RcsCas13a | Rhodobacter | WP_013067728.1 | GCCTCACATCACCGCCAAGACGACG |
| | | capsulatus SB | | GCGGACTGAAC (SEQ ID NO: 456) |
| | | 1003 | | |
| Cas13a14 | RcrCas13a | Rhodobacter | WP_023911507.1 | GCCTCACATCACCGCCAAGACGACG |
| | | capsulatus R121 | | GCGGACTGAAC (SEQ ID NO: |
| | | | | 457) |
| Cas13a15 | RcdCas13a | Rhodobacter | WP_023911507.1 | GCCTCACATCACCGCCAAGACGACG |
| | | capsulatus | | GCGGACTGAAC (SEQ ID NO: |
| | | DE442 | | 458) |

[0117] Exemplary wild type Cas13a proteins of the disclosure may comprise or consist of the amino acid sequence of SEQ ID NO: 459.

[0118] Exemplary Cas13b proteins include, but are not limited to:

| Species | Cas13b Accession | Cas13b Size (aa) |
|---|---|---|
| Paludibacter propionicigenes WB4 | WP_013446107.1 | 1155 |
| Prevotella sp. P5-60 | WP_044074780.1 | 1091 |
| Prevotella sp. P4-76 | WP_044072147.1 | 1091 |
| Prevotella sp. P5-125 | WP_044065294.1 | 1091 |
| Prevotella sp. P5-119 | WP_042518169.1 | 1091 |
| Capnocytophaga canimorsus Cc5 | WP_013997271.1 | 1200 |
| Phaeodactylibacter xiamenensis | WP_044218239.1 | 1132 |
| Porphyromonas gingivalis W83 | WP_005873511.1 | 1136 |
| Porphyromonas gingivalis F0570 | WP_021665475.1 | 1136 |
| Porphyromonas gingivalis ATCC 33277 | WP_012458151.1 | 1136 |
| Porphyromonas gingivalis F0185 | ERJ81987.1 | 1136 |
| Porphyromonas gingivalis F0185 | WP_021677657.1 | 1136 |
| Porphyromonas gingivalis SJD2 | WP_023846767.1 | 1136 |
| Porphyromonas gingivalis F0568 | ERJ65637.1 | 1136 |
| Porphyromonas gingivalis W4087 | ERJ87335.1 | 1136 |
| Porphyromonas gingivalis W4087 | WP_021680012.1 | 1136 |
| Porphyromonas gingivalis F0568 | WP_021663197.1 | 1136 |
| Porphyromonas gingivalis | WP_061156637.1 | 1136 |
| Porphyromonas gulae | WP_039445055.1 | 1136 |
| Bacteroides pyogenes F0041 | ERI81700.1 | 1116 |
| Bacteroides pyogenes JCM 10003 | WP_034542281.1 | 1116 |
| Alistipes sp. ZOR0009 | WP_047447901.1 | 954 |
| Flavobacterium branchiophilum FL-15 | WP_014084666.1 | 1151 |
| Prevotella sp. MA2016 | WP_036929175.1 | 1323 |
| Myroides odoratimimus CCUG 10230 | EHO06562.1 | 1160 |
| Myroides odoratimimus CCUG 3837 | EKB06014.1 | 1158 |
| Myroides odoratimimus CCUG 3837 | WP_006265509.1 | 1158 |
| Myroides odoratimimus CCUG 12901 | WP_006261414.1 | 1158 |
| Myroides odoratimimus CCUG 12901 | EHO08761.1 | 1158 |
| Myroides odoratimimus (NZ_CP013690.1) | WP_058700060.1 | 1160 |
| Bergeyella zoohelcum ATCC 43767 | EKB54193.1 | 1225 |
| Capnocytophaga cynodegmi | WP_041989581.1 | 1219 |
| Bergeyella zoohelcum ATCC 43767 | WP_002664492.1 | 1225 |
| Flavobacterium sp. 316 | WP_045968377.1 | 1156 |
| Psychroflexus torquis ATCC 700755 | WP_015024765.1 | 1146 |
| Flavobacterium columnare ATCC 49512 | WP_014165541.1 | 1180 |
| Flavobacterium columnare | WP_060381855.1 | 1214 |
| Flavobacterium columnare | WP_063744070.1 | 1214 |
| Flavobacterium columnare | WP_065213424.1 | 1215 |
| Chryseobacterium sp. YR477 | WP_047431796.1 | 1146 |
| Riemerella anatipestifer ATCC 11845 = DSM | WP_004919755.1 | 1096 |
| 15868 | | |
| Riemerella anatipestifer RA-CH-2 | WP_015345620.1 | 949 |
| Riemerella anatipestifer | WP_049354263.1 | 949 |
| Riemerella anatipestifer | WP_061710138.1 | 951 |
| Riemerella anatipestifer | WP_064970887.1 | 1096 |
| Prevotella saccharolytica F0055 | EKY00089.1 | 1151 |
| Prevotella saccharolytica JCM 17484 | WP_051522484.1 | 1152 |
| Prevotella buccae ATCC 33574 | EFU31981.1 | 1128 |
| Prevotella buccae ATCC 33574 | WP_004343973.1 | 1128 |
| Prevotella buccae D17 | WP004343581.1 | 1128 |
| Prevotella sp. MSX73 | WP_007412163.1 | 1128 |
| Prevotella pallens ATCC 700821 | EGQ18444.1 | 1126 |
| Prevotella pallens ATCC 700821 | WP_006044833.1 | 1126 |
| Prevotella intermedia ATCC 25611 = DSM 20706 | WP_036860899.1 | 1127 |
| Prevotella intermedia | WP_061868553.1 | 1121 |
| Prevotella intermedia 17 | AFJ07523.1 | 1135 |
| Prevotella intermedia | WP_050955369.1 | 1133 |
| Prevotella intermedia | BAU18623.1 | 1134 |
| Prevotella intermedia ZT | KJJ86756.1 | 1126 |
| Prevotella aurantiaca JCM 15754 | WP_025000926.1 | 1125 |
| Prevotella pleuritidis F0068 | WP_021584635.1 | 1140 |
| Prevotella pleuritidis JCM 14110 | WP_036931485.1 | 1117 |
| Prevotella falsenii DSM 22864 = JCM 15124 | WP_036884929.1 | 1134 |
| Porphyromonas gulae | WP_039418912.1 | 1176 |
| Porphyromonas sp. COT-052 OH4946 | WP_039428968.1 | 1176 |
| Porphyromonas gulae | WP_039442171.1 | 1175 |
| Porphyromonas gulae | WP_039431778.1 | 1176 |
| Porphyromonas gulae | WP_046201018.1 | 1176 |
| Porphyromonas gulae | WP_039434803.1 | 1176 |
| Porphyromonas gulae | WP_039419792.1 | 1120 |
| Porphyromonas gulae | WP_039426176.1 | 1120 |
| Porphyromonas gulae | WP_039437199.1 | 1120 |
| Porphyromonas gingivalis TDC60 | WP_013816155.1 | 1120 |
| Porphyromonas gingivalis ATCC 33277 | WP_012458414.1 | 1120 |
| Porphyromonas gingivalis A7A1-28 | WP_058019250.1 | 1176 |
| Porphyromonas gingivalis JCVI SC001 | EOA10535.1 | 1176 |
| Porphyromonas gingivalis W50 | WP_005874195.1 | 1176 |
| Porphyromonas gingivalis | WP_052912312.1 | 1176 |
| Porphyromonas gingivalis AJW4 | WP_053444417.1 | 1120 |
| Porphyromonas gingivalis | WP_039417390.1 | 1120 |
| Porphyromonas gingivalis | WP_061156470.1 | 1120 |

[0119] Exemplary wild type Bergeyella zoohelcum ATCC 43767 Cas13b (BzCas13b) proteins of the disclosure may comprise or consist of the amino acid sequence of SEQ ID NO: 460.

[0120] In some embodiments of the compositions of the disclosure, the sequence encoding the RNA binding protein comprises a sequence isolated or derived from a Cas13d protein. Cas13d is an effector of the type V-D CRISPR-Cas systems. In some embodiments, the Cas13d protein is an RNA-guided RNA endonuclease enzyme that can cut or bind RNA. In some embodiments, the Cas13d protein can include one or more higher eukaryotes and prokaryotes nucleotide-binding (HEPN) domains. In some embodiments, the Cas13d protein can include either a wild-type or mutated HEPN domain. In some embodiments, the Cas13d protein includes a mutated HEPN domain that cannot cut RNA but can process guide RNA. In some embodiments, the Cas13d protein does not require a protospacer flanking sequence. Also see WO Publication No. WO2019/040664 & US2019/0062724, which is incorporated herein by reference in its entirety, for further examples and sequences of Cas13d protein, without limitation.

[0121] In some embodiments, Cas13d sequences of the disclosure include without limitation SEQ ID NOS: 1-296 of WO 2019/040664, so numbered herein and included herewith.

[0122] SEQ ID NO: 1 is an exemplary Cas13d sequence from Eubacterium siraeum containing a HEP site.

[0123] SEQ ID NO: 2 is an exemplary Cas13d sequence from Eubacterium siraeum containing a mutated HEPN site.

[0124] SEQ ID NO: 3 is an exemplary Cas13d sequence from uncultured Ruminococcus sp. containing a HEPN site.

[0125] SEQ ID NO: 4 is an exemplary Cas13d sequence from uncultured Ruminococcus sp. containing a mutated HEPN site.

[0126] SEQ ID NO: 5 is an exemplary Cas13d sequence from Gut_metagenome_contig2791000549.

[0127] SEQ ID NO: 6 is an exemplary Cas13d sequence from Gut_metagenome_contig855000317

[0128] SEQ ID NO: 7 is an exemplary Cas13d sequence from Gut_metagenome_contig3389000027.

[0129] SEQ ID NO: 8 is an exemplary Cas13d sequence from Gut_metagenome_contig8061000170.

[0130] SEQ ID NO: 9 is an exemplary Cas13d sequence from Gut_metagenome_contigl509000299.

[0131] SEQ ID NO: 10 is an exemplary Cas13d sequence from Gut_metagenome_contig9549000591.

[0132] SEQ ID NO: 11 is an exemplary Cas13d sequence from Gut_metagenome_contig71000500.

[0133] SEQ ID NO: 12 is an exemplary Cas13d sequence from human gut metagenome.

[0134] SEQ ID NO: 13 is an exemplary Cas13d sequence from Gut_metagenome_contig3915000357.

[0135] SEQ ID NO: 14 is an exemplary Cas13d sequence from Gut_metagenome_contig4719000173.

[0136] SEQ ID NO: 15 is an exemplary Cas13d sequence from Gut_metagenome_contig6929000468.

[0137] SEQ ID NO: 16 is an exemplary Cas3d sequence from Gut_metagenome_contig7367000486.

[0138] SEQ ID NO: 17 is an exemplary Cas13d sequence from Gut_metagenome_contig7930000403.

[0139] SEQ ID NO: 18 is an exemplary Cas13d sequence from Gut_metagenome_contig993000527.

[0140] SEQ ID NO: 19 is an exemplary Cas13d sequence from Gut_metagenome_contig6552000639.

[0141] SEQ ID NO: 20 is an exemplary Cas13d sequence from Gut_metagenome_contig11932000246.

[0142] SEQ ID NO: 21 is an exemplary Cas13d sequence from Gut_metagenome_contigl2963000286.

[0143] SEQ ID NO: 22 is an exemplary Cas13d sequence from Gut_metagenome_contig2952000470.

[0144] SEQ ID NO: 23 is an exemplary Cas13d sequence from Gut_metagenome_contig451000394.

[0145] SEQ ID NO: 24 is an exemplary Cas13d sequence from Eubacterium_siraeum_DSM_15702.

[0146] SEQ ID NO: 25 is an exemplary Cas13d sequence from gut_metagenome_P19E0k2120140920,_c369000003.

[0147] SEQ ID NO: 26 is an exemplary Cas13d sequence from Gut_metagenome_contig7593000362.

[0148] SEQ ID NO: 27 is an exemplary Cas13d sequence from Gut_metagenome_contigl2619000055.

[0149] SEQ ID NO: 28 is an exemplary Cas13d sequence from Gut_metagenome_contigl405000151.

[0150] SEQ ID NO: 29 is an exemplary Cas13d sequence from Chicken_gut_metagenome_c298474.

[0151] SEQ ID NO: 30 is an exemplary Cas13d sequence from Gut_metagenome_contigl516000227.

[0152] SEQ ID NO: 31 is an exemplary Cas13d sequence from Gut_metagenome_contigl838000319.

[0153] SEQ ID NO: 32 is an exemplary Cas13d sequence from Gut_metagenome_contig13123000268.

[0154] SEQ ID NO: 33 is an exemplary Cas13d sequence from Gut_metagenome_contig5294000434.

[0155] SEQ ID NO: 34 is an exemplary Cas13d sequence from Gut_metagenome_contig6415000192.

[0156] SEQ ID NO: 35 is an exemplary Cas13d sequence from Gut_metagenome_contig6144000300.

[0157] SEQ ID NO: 36 is an exemplary Cas13d sequence from Gut_metagenome_contig9118000041.

[0158] SEQ ID NO: 37 is an exemplary Cas13d sequence from Activated_sludge_metagenome_transcript_124486.

[0159] SEQ ID NO: 38 is an exemplary Cas13d sequence from Gut_metagenome_contig1322000437.

[0160] SEQ ID NO: 39 is an exemplary Cas13d sequence from Gut_metagenome_contig4582000531.

[0161] SEQ ID NO: 40 is an exemplary Cas13d sequence from Gut_metagenome_contig9190000283.

[0162] SEQ ID NO: 41 is an exemplary Cas13d sequence from Gut_metagenome_contigl709000510.

[0163] SEQ ID NO: 42 is an exemplary Cas13d sequence from M24_(LSQX01212483_Anaerobic_digester_metagenome) with a HEPN domain.

[0164] SEQ ID NO: 43 is an exemplary Cas13d sequence from Gut_metagenome_contig3833000494.

[0165] SEQ ID NO: 44 is an exemplary Cas13d sequence from Activated_sludge_metagenome_transcript_117355.

[0166] SEQ ID NO: 45 is an exemplary Cas13d sequence from Gut_metagenome_contigl061000330.

[0167] SEQ ID NO: 46 is an exemplary Cas13d sequence from Gut_metagenome_contig338000322 from sheep gut metagenome.

[0168] SEQ ID NO: 47 is an exemplary Cas13d sequence from human gut metagenome.

[0169] SEQ ID NO: 48 is an exemplary Cas13d sequence from Gut_metagenome_contig9530000097.

[0170] SEQ ID NO: 49 is an exemplary Cas13d sequence from Gut_metagenome_contigl750000258.

[0171] SEQ ID NO: 50 is an exemplary Cas13d sequence from Gut_metagenome_contig5377000274.

[0172] SEQ ID NO: 51 is an exemplary Cas13d sequence from gut_metagenome_P19E0k2120140920_c248000089.

[0173] SEQ ID NO: 52 is an exemplary Cas13d sequence from Gut_metagenome_contigl400000031.

[0174] SEQ ID NO: 53 is an exemplary Cas13d sequence from Gut_metagenome_contig7940000191.

[0175] SEQ ID NO: 54 is an exemplary Cas13d sequence from Gut_metagenome_contig6049000251.

[0176] SEQ ID NO: 55 is an exemplary Cas13d sequence from Gut_metagenome_contigl137000500.

[0177] SEQ ID NO: 56 is an exemplary Cas13d sequence from Gut_metagenome_contig9368000105.

[0178] SEQ ID NO: 57 is an exemplary Cas13d sequence from Gut_metagenome_contig546000275.

[0179] SEQ ID NO: 58 is an exemplary Cas13d sequence from Gut_metagenome_contig7216000573.

[0180] SEQ ID NO: 59 is an exemplary Cas13d sequence from Gut_metagenome_contig4806000409.

[0181] SEQ ID NO: 60 is an exemplary Cas13d sequence from Gut_metagenome_contig10762000480.

[0182] SEQ ID NO: 61 is an exemplary Cas13d sequence from Gut_metagenome_contig4114000374.

[0183] SEQ ID NO: 62 is an exemplary Cas13d sequence from Ruminococcus_flavefaciens_FD1.

[0184] SEQ ID NO: 63 is an exemplary Cas13d sequence from Gut_metagenome_contig7093000170.

[0185] SEQ ID NO: 64 is an exemplary Cas13d sequence from Gut_metagenome_contigl1113000384.

[0186] SEQ ID NO: 65 is an exemplary Cas13d sequence from Gut_metagenome_contig6403000259.

[0187] SEQ ID NO: 66 is an exemplary Cas13d sequence from Gut_metagenome_contig6193000124.

[0188] SEQ ID NO: 67 is an exemplary Cas13d sequence from Gut_metagenome_contig721000619.

[0189] SEQ ID NO: 68 is an exemplary Cas13d sequence from Gut_metagenome_contigl666000270.

[0190] SEQ ID NO: 69 is an exemplary Cas13d sequence from Gut_metagenome_contig2002000411.

[0191] SEQ ID NO: 70 is an exemplary Cas13d sequence from Ruminococcus_albus.

[0192] SEQ ID NO: 71 is an exemplary Cas13d sequence from Gut_metagenome_contig13552000311.

[0193] SEQ ID NO: 72 is an exemplary Cas13d sequence from Gut_metagenome_contig10037000527.

[0194] SEQ ID NO: 73 is an exemplary Cas13d sequence from Gut_metagenome_contig238000329.

[0195] SEQ ID NO: 74 is an exemplary Cas13d sequence from Gut_metagenome_contig2643000492.

[0196] SEQ ID NO: 75 is an exemplary Cas13d sequence from Gut_metagenome_contig874000057.

[0197] SEQ ID NO: 76 is an exemplary Cas13d sequence from Gut_metagenome_contig4781000489.

[0198] SEQ ID NO: 77 is an exemplary Cas13d sequence from Gut_metagenome_contigl2144000352.

[0199] SEQ ID NO: 78 is an exemplary Cas13d sequence from Gut_metagenome_contig5590000448.

[0200] SEQ ID NO: 79 is an exemplary Cas13d sequence from Gut_metagenome_contig9269000031.

[0201] SEQ ID NO: 80 is an exemplary Cas13d sequence from Gut_metagenome_contig8537000520.

[0202] SEQ ID NO: 81 is an exemplary Cas13d sequence from Gut_metagenome_contigl845000130.

[0203] SEQ ID NO: 82 is an exemplary Cas13d sequence from gut_metagenome_P13E0k2120140920_c3000072.

[0204] SEQ ID NO: 83 is an exemplary Cas13d sequence from gut_metagenome_P1 E0k2120140920_cI000078.

[0205] SEQ ID NO: 84 is an exemplary Cas13d sequence from Gut_metagenome_contigl2990000099.

[0206] SEQ ID NO: 85 is an exemplary Cas13d sequence from Gut_metagenome_contig525000349.

[0207] SEQ ID NO: 86 is an exemplary Cas13d sequence from Gut_metagenome_contig7229000302.

[0208] SEQ ID NO: 87 is an exemplary Cas13d sequence from Gut_metagenome_contig3227000343.

[0209] SEQ ID NO: 88 is an exemplary Cas13d sequence from Gut_metagenome_contig7030000469.

[0210] SEQ ID NO: 89 is an exemplary Cas13d sequence from Gut_metagenome_contig5149000068.

[0211] SEQ ID NO: 90 is an exemplary Cas13d sequence from Gut_metagenome_contig400200045.

[0212] SEQ ID NO: 91 is an exemplary Cas13d sequence from Gut_metagenome_contig10420000446.

[0213] SEQ ID NO: 92 is an exemplary Cas13d sequence from new_flavefaciens_strain_XPD3002 (CasRx).

[0214] SEQ ID NO: 93 is an exemplary Cas13d sequence from M26_Gut_metagenome_contig698000307.

[0215] SEQ ID NO: 94 is an exemplary Cas13d sequence from M36_Uncultured_Eubacterium_sp_TS28_c40956.

[0216] SEQ ID NO: 95 is an exemplary Cas13d sequence from M12_gut_metagenome_P25Ck2120140920_c134000066.

[0217] SEQ ID NO: 96 is an exemplary Cas13d sequence from human gut metagenome.

[0218] SEQ ID NO: 97 is an exemplary Cas13d sequence from MlO_gut_metagenome_P25C90k2120 1 40920_c2800004 1.

[0219] SEQ ID NO: 98 is an exemplary Cas13d sequence from 30 Ml I_gut_metagenome_P25C7k2120140920_c4078000105.

[0220] SEQ ID NO: 99 is an exemplary Cas13d sequence from gut_metagenome_P25C0k2120140920_c32000045.

[0221] SEQ ID NO: 100 is an exemplary Cas13d sequence from M13_gut_metagenome_P23C7k2120140920 c3000067.

[0222] SEQ ID NO: 101 is an exemplary Cas13d sequence from M5_gut_metagenome_P8E90k2120140920.

[0223] SEQ ID NO: 102 is an exemplary Cas13d sequence from M21_gut_metagenome_P8E0k2120140920.

[0224] SEQ ID NO: 103 is an exemplary Cas13d sequence from M7_gut_metagenome_P38C7k2120 1 40920_c484 1000003.

[0225] SEQ ID NO: 104 is an exemplary Cas13d sequence from Ruminococcus_bicirculans.

[0226] SEQ ID NO: 105 is an exemplary Cas13d sequence.

[0227] SEQ ID NO: 106 is an exemplary Cas13d consensus sequence.

[0228] SEQ ID NO: 107 is an exemplary Cas13d sequence from M18_gut_metagenome_P22EOk2120140920_c3395000078.

[0229] SEQ ID NO: 108 is an exemplary Cas13d sequence from M17_gut_metagenome_P22E90k2120140920_c114.

[0230] SEQ ID NO: 109 is an exemplary Cas13d sequence from Ruminococcus_sp_CAG57.

[0231] SEQ ID NO: 110 is an exemplary Cas13d sequence from gut_metagenome_Pl 1E90k2120140920_c43000123.

[0232] SEQ ID NO: 111 is an exemplary Cas13d sequence from M6_gut_metagenome_P13E90k2120 1 40920_c7000009.

[0233] SEQ ID NO: 112 is an exemplary Cas13d sequence from M19_gut_metagenome_Pl 7E90k2120140920.

[0234] SEQ ID NO: 113 is an exemplary Cas13d sequence from gut_metagenome_Pl7E0k2120140920,_c87000043.

[0235] SEQ ID NO: 114 is an exemplary human codon optimized Eubacterium siraeum Cas13d nucleic acid sequence.

[0236] SEQ ID NO: 115 is an exemplary human codon optimized Eubacterium siraeum Cas13d nucleic acid sequence with a mutant HEPN domain.

[0237] SEQ ID NO: 116 is an exemplary human codon-optimized Eubacterium siraeum Cas13d nucleic acid sequence with N-terminal NLS.

[0238] SEQ ID NO: 117 is an exemplary human codon-optimized Eubacterium siraeum Cas13d nucleic acid sequence with N- and C-terminal NLS tags.

[0239] SEQ ID NO: 118 is an exemplary human codon-optimized uncultured Ruminococcus sp. Cas13d 30 nucleic acid sequence.

[0240] SEQ ID NO: 119 is an exemplary human codon-optimized uncultured Ruminococcus sp. Cas13d nucleic acid sequence with a mutant HEPN domain.

[0241] SEQ ID NO: 120 is an exemplary human codon-optimized uncultured Ruminococcus sp. Cas13d nucleic acid sequence with N-terminal NLS.

[0242] SEQ ID NO: 121 is an exemplary human codon-optimized uncultured Ruminococcus sp. Cas13d nucleic acid sequence with N- and C-terminal NLS tags.

[0243] SEQ ID NO: 122 is an exemplary human codon-optimized uncultured Ruminococcus flavefaciens FDl Cas13d nucleic acid sequence.

[0244] SEQ ID NO: 123 is an exemplary human codon-optimized uncultured Ruminococcus flavefaciens FDl Cas13d nucleic acid sequence with mutated HEPN domain.

[0245] SEQ ID NO: 124 is an exemplary Cas13d nucleic acid sequence from Ruminococcus bicirculans.

[0246] SEQ ID NO: 125 is an exemplary Cas13d nucleic acid sequence from Eubacterium siraeum.

[0247] SEQ ID NO: 126 is an exemplary Cas13d nucleic acid sequence from Ruminococcus flavefaciens FD1.

[0248] SEQ ID NO: 127 is an exemplary Cas13d nucleic acid sequence from Ruminococcus albus.

[0249] SEQ ID NO: 128 is an exemplary Cas13d nucleic acid sequence from Ruminococcus flavefaciens XPD.

[0250] SEQ ID NO: 129 is an exemplary consensus DR nucleic acid sequence for E. siraeum Cas13d.

[0251] SEQ ID NO: 130 is an exemplary consensus DR nucleic acid sequence for Rum. Sp. Cas13d.

[0252] SEQ ID NO: 131 is an exemplary consensus DR nucleic acid sequence for Rum. Flavefaciens strain XPD3002 Cas13d (CasRx).

[0253] SEQ ID NOS: 132-137 are exemplary consensus DR nucleic acid sequences.

[0254] SEQ ID NO: 138 is an exemplary 50% consensus sequence for seven full-length Cas13d orthologues.

[0255] SEQ ID NO: 139 is an exemplary Cas13d nucleic acid sequence from Gut metagenome PlEO.

[0256] SEQ ID NO: 140 is an exemplary Cas13d nucleic acid sequence from Anaerobic digester.

[0257] SEQ ID NO: 141 is an exemplary Cas13d nucleic acid sequence from Ruminococcus sp. CAG:57.

[0258] SEQ ID NO: 142 is an exemplary human codon-optimized uncultured Gut metagenome PlEO Cas13d nucleic acid sequence.

[0259] SEQ ID NO: 143 is an exemplary human codon-optimized Anaerobic Digester Cas13d nucleic acid sequence.

[0260] SEQ ID NO: 144 is an exemplary human codon-optimized Ruminococcus flavefaciens XPD Cas13d nucleic acid sequence.

[0261] SEQ ID NO: 145 is an exemplary human codon-optimized Ruminococcus albus Cas13d nucleic acid sequence.

[0262] SEQ ID NO: 146 is an exemplary processing of the Ruminococcus sp. CAG:57 CRISPR array.

[0263] SEQ ID NO: 147 is an exemplary Cas13d protein sequence from contig emb |OBVH01003037.1, human gut metagenome sequence (also found in WGS contigs emb |OBXZ01000094.1| and emb |OBJFO1000033.1.

[0264] SEQ ID NO: 148 is an exemplary consensus DR nucleic acid sequence (goes with SEQ ID NO:147).

[0265] SEQ ID NO: 149 is an exemplary Cas13d protein sequence from contig tpg |DBYI01000091.1| (Uncultivated Ruminococcus flavefaciens UBA1190 assembled from bovine gut metagenome).

[0266] SEQ ID NOS: 150-152 are exemplary consensus DR nucleic acid sequences (goes with SEQ ID NO: 149).

[0267] SEQ ID NO: 153 is an exemplary Cas13d protein sequence from contig tpg |DJXD01000002.1| (uncultivated Ruminococcus assembly, UBA7013, from sheep gutmetagenome).

[0268] SEQ ID NO: 154 is an exemplary consensus DR nucleic acid sequence (goes with SEQ ID NO: 153).

[0269] SEQ ID NO: 155 is an exemplary Cas13d protein sequence from contig OGZC01000639.1 (human gut metagenome assembly).

[0270] SEQ ID NOS: 156-177 are exemplary consensus DR nucleic acid sequences (goes with SEQ ID NO: 155).

[0271] SEQ ID NO: 158 is an exemplary Cas13d protein sequence from contig emb |OHBM01000764.1 (human gut metagenome assembly).

[0272] SEQ ID NO: 159 is an exemplary consensus DR nucleic acid sequence (goes with SEQ ID NO:158).

[0273] SEQ ID NO: 160 is an exemplary Cas13d protein sequence from contig emb |0HCP01000044.1 (human gut metagenome assembly).

[0274] SEQ ID NO: 161 is an exemplary consensus DR nucleic acid sequence (goes with SEQ ID NO: 160).

[0275] SEQ ID NO: 162 is an exemplary Cas13d protein sequence from contig embl0GDF01008514.1| (human gut metagenome assembly).

[0276] SEQ ID NO: 163 is an exemplary consensus DR nucleic acid sequence (goes with SEQ ID NO: 162).

[0277] SEQ ID NO: 164 is an exemplary Cas13d protein sequence from contig emb |0GPN01002610.1 (human gut metagenome assembly).

[0278] SEQ ID NO: 165 is an exemplary consensus DR nucleic acid sequence (goes with SEQ ID NO: 164).

[0279] SEQ ID NO: 166 is an exemplary Cas13d protein sequence from contig NFIR01000008. 1 (Eubacterium sp. An3, from chicken gut metagenome).

[0280] SEQ ID NO: 167 is an exemplary consensus DR nucleic acid sequence (goes with SEQ ID NO: 166).

[0281] SEQ ID NO: 168 is an exemplary Cas13d protein sequence from contig NFLV01000009.1 (Eubacterium sp. An11 from chicken gut metagenome).

[0282] SEQ ID NO: 169 is an exemplary consensus DR nucleic acid sequence (goes with SEQ ID NO: 168).

[0283] SEQ ID NOS: 171-174 are an exemplary Cas13d motif sequences.

[0284] SEQ ID NO: 175 is an exemplary Cas13d protein sequence from contig OJMM01002900 human gut metagenome sequence.

[0285] SEQ ID NO: 176 is an exemplary consensus DR nucleic acid sequence (goes with SEQ ID NO: 175).

[0286] SEQ ID NO: 177 is an exemplary Cas13d protein sequence from contig ODAI011611274.1 gut metagenome sequence.

[0287] SEQ ID NO: 178 is an exemplary consensus DR nucleic acid sequence (goes with SEQ ID NO: 177).

[0288] SEQ ID NO: 179 is an exemplary Cas13d protein sequence from contig OIZX01000427.1.

[0289] SEQ ID NO: 180 is an exemplary consensus DR nucleic acid sequence (goes with SEQ ID NO:179).

[0290] SEQ ID NO: 181 is an exemplary Cas13d protein sequence from contig emb |OCVV012889144.1|.

[0291] SEQ ID NO: 182 is an exemplary consensus DR nucleic acid sequence (goes with SEQ ID NO: 181).

[0292] SEQ ID NO: 183 is an exemplary Cas13d protein sequence from contig OCTW011587266.1

[0293] SEQ ID NO: 184 is an exemplary consensus DR nucleic acid sequence (goes with SEQ ID NO: 183).

[0294] SEQ ID NO: 185 is an exemplary Cas13d protein sequence from contig emb |OGNFO 1009141.1.

[0295] SEQ ID NO: 186 is an exemplary consensus DR nucleic acid sequence (goes with SEQ ID NO: 185).

[0296] SEQ ID NO: 187 is an exemplary Cas13d protein sequence from contig emb |OIEN01002196.1.

[0297] SEQ ID NO: 188 is an exemplary consensus DR nucleic acid sequence (goes with SEQ ID NO: 187).

[0298] SEQ ID NO: 189 is an exemplary Cas13d protein sequence from contig e-k87_11092736.

[0299] SEQ ID NOS: 190-193 are exemplary consensus DR nucleic acid sequences (goes with SEQ ID NO: 189).

[0300] SEQ ID NO: 194 is an exemplary Cas13d sequence from Gut_metagenome_contig6893000291.

[0301] SEQ ID NOS: 195-197 are exemplary Cas13d motif sequences.

[0302] SEQ ID NO: 198 is an exemplary Cas13d protein sequence from Ga0224415_10007274.

[0303] SEQ ID NO: 199 is an exemplary consensus DR nucleic acid sequence (goes with SEQ ID NO: 198).

[0304] SEQ ID NO: 200 is an exemplary Cas13d protein sequence from EMG_10003641.

[0305] SEQ ID NO: 202 is an exemplary Cas13d protein sequence from Ga0129306_1000735.

[0306] SEQ ID NO: 201 is an exemplary consensus DR nucleic acid sequence (goes with SEQ ID NO: 200).

[0307] SEQ ID NO: 202 is an exemplary Cas13d protein sequence from Ga0129306_1000735.

[0308] SEQ ID NO: 203 is an exemplary consensus DR nucleic acid sequence (goes with SEQ ID NO: 203

[0309] SEQ ID NO: 204 is an exemplary Cas13d protein sequence from GaO129317_1 008067.

[0310] SEQ ID NO: 205 is an exemplary consensus DR nucleic acid sequence (goes with SEQ ID NO: 204).

[0311] SEQ ID NO: 206 is an exemplary Cas13d protein sequence from Ga0224415_10048792.

[0312] SEQ ID NO: 207 is an exemplary consensus DR nucleic acid sequence (goes with SEQ ID NO: 206).

[0313] SEQ ID NO: 208 is an exemplary Cas13d protein sequence from 160582958_gene49834.

[0314] SEQ ID NO: 209 is an exemplary consensus DR nucleic acid sequence (goes with SEQ ID NO: 208).

[0315] SEQ ID NO: 210 is an exemplary Cas13d protein sequence from 250twins_35838_GL0110300.

[0316] SEQ ID NO: 211 is an exemplary consensus DR nucleic acid sequence (goes with SEQ ID NO: 210).

[0317] SEQ ID NO: 212 is an exemplary Cas13d protein sequence from 250twins_36050_GLOI58985.

[0318] SEQ ID NO: 213 is an exemplary consensus DR nucleic acid sequence (goes with SEQ ID NO: 212).

[0319] SEQ ID NO: 214 is an exemplary Cas13d protein sequence from 31009_GL0034153.

[0320] SEQ ID NO: 215 is an exemplary consensus DR nucleic acid sequence (goes with SEQ ID NO: 214).

[0321] SEQ ID NO: 216 is an exemplary Cas13d protein sequence from 530373_GL0023589.

[0322] SEQ ID NO: 217 is an exemplary consensus DR nucleic acid sequence (goes with SEQ ID NO: 216).

[0323] SEQ ID NO: 218 is an exemplary Cas13d protein sequence from BMZ-1 1B_GL0037771.

[0324] SEQ ID NO: 219 is an exemplary consensus DR nucleic acid sequence (goes with SEQ ID NO: 218).

[0325] SEQ ID NO: 220 is an exemplary Cas13d protein sequence from BMZ-1 1B_GL0037915.

[0326] SEQ ID NO: 221 is an exemplary consensus DR nucleic acid sequence (goes with SEQ ID NO: 220).

[0327] SEQ ID NO: 222 is an exemplary Cas13d protein sequence from BMZ-1 1B_GL00696 17.

[0328] SEQ ID NO: 223 is an exemplary consensus DR nucleic acid sequence (goes with SEQ ID NO: 222).

[0329] SEQ ID NO: 224 is an exemplary Cas13d protein sequence from DLF014_GL0011914.

[0330] SEQ ID NO: 225 is an exemplary consensus DR nucleic acid sequence (goes with SEQ ID NO: 224).

[0331] SEQ ID NO: 226 is an exemplary Cas13d protein sequence from EYZ-362B_GL0088915.

[0332] SEQ ID NO: 227-228 are exemplary consensus DR nucleic acid sequences (goes with SEQ ID NO: 226).

[0333] SEQ ID NO: 229 is an exemplary Cas13d protein sequence from Ga0099364 10024192.

[0334] SEQ ID NO: 230 is an exemplary consensus DR nucleic acid sequence (goes with SEQ ID NO: 229).

[0335] SEQ ID NO: 231 is an exemplary Cas13d protein sequence from Ga0187910_10006931.

[0336] SEQ ID NO: 232 is an exemplary consensus DR nucleic acid sequence (goes with SEQ ID NO: 231).

[0337] SEQ ID NO: 233 is an exemplary Cas13d protein sequence from Ga0187910_10015336.

[0338] SEQ ID NO: 234 is an exemplary consensus DR nucleic acid sequence (goes with SEQ ID NO: 233).

[0339] SEQ ID NO: 235 is an exemplary Cas13d protein sequence from Ga0187910_10040531.

[0340] SEQ ID NO: 236 is an exemplary consensus DR nucleic acid sequence (goes with SEQ ID NO: 23).

[0341] SEQ ID NO: 237 is an exemplary Cas13d protein sequence from Ga0187911_10069260.

[0342] SEQ ID NO: 238 is an exemplary consensus DR nucleic acid sequence (goes with SEQ ID NO: 237).

[0343] SEQ ID NO: 239 is an exemplary Cas13d protein sequence from MH0288_GL0082219.

[0344] SEQ ID NO: 240 is an exemplary consensus DR nucleic acid sequence (goes with SEQ ID NO: 239).

[0345] SEQ ID NO: 241 is an exemplary Cas13d protein sequence from O2.UC29-0_GL0096317.

[0346] SEQ ID NO: 242 is an exemplary consensus DR nucleic acid sequence (goes with SEQ ID NO: 241).

[0347] SEQ ID NO: 243 is an exemplary Cas13d protein sequence from PIG-014_GL0226364.

[0348] SEQ ID NO: 244 is an exemplary consensus DR nucleic acid sequence (goes with SEQ ID NO: 243).

[0349] SEQ ID NO: 245 is an exemplary Cas13d protein sequence from PIG-018_GL0023397.

[0350] SEQ ID NO: 246 is an exemplary consensus DR nucleic acid sequence (goes with SEQ ID NO: 245).

[0351] SEQ ID NO: 247 is an exemplary Cas13d protein sequence from PIG-025_GL0099734.

[0352] SEQ ID NO: 248 is an exemplary consensus DR nucleic acid sequence (goes with SEQ ID NO: 247).

[0353] SEQ ID NO: 249 is an exemplary Cas13d protein sequence from PIG-028_GL0185479.

[0354] SEQ ID NO: 250 is an exemplary consensus DR nucleic acid sequence (goes with SEQ ID NO: 249).

[0355] SEQ ID NO: 251 is an exemplary Cas13d protein sequence from -Ga0224422_10645759.

[0356] SEQ ID NO: 252 is an exemplary consensus DR nucleic acid sequence (goes with SEQ ID NO: 251).

[0357] SEQ ID NO: 253 is an exemplary Cas13d protein sequence from ODAI chimera.

[0358] SEQ ID NO: 254 is an exemplary consensus DR nucleic acid sequence (goes with SEQ ID NO: 253).

[0359] SEQ ID NO: 255 is an HEPN motif.

[0360] SEQ ID NOs: 256 and 257 are exemplary Cas13d nuclear localization signal amino acid and nucleic acid sequences, respectively.

[0361] SEQ ID NOs: 258 and 260 are exemplary SV40 large T antigen nuclear localization signal amino acid and nucleic acid sequences, respectively.

[0362] SEQ ID NO: 259 is a dCas9 target sequence.

[0363] SEQ ID NO: 261 is an artificial Eubacterium siraeum nCasl array targeting ccdB.

[0364] SEQ ID NO: 262 is a full 36 nt direct repeat.

[0365] SEQ ID NOs: 263-266 are spacer sequences.

[0366] SEQ ID NO: 267 is an artificial uncultured Ruminoccus sp. nCasl array targeting ccdB.

[0367] SEQ ID NO: 268 is a full 36 nt direct repeat.

[0368] SEQ ID NOs: 269-272 are spacer sequences.

[0369] SEQ ID NO: 273 is a ccdB target RNA sequence.

[0370] SEQ ID NOs: 274-277 are spacer sequences.

[0371] SEQ ID NO: 278 is a mutated Cas13d sequence, NLS-Ga_0531(trunc)-NLS-HA. This mutant has a deletion of the non-conserved N-terminus.

[0372] SEQ ID NO: 279 is a mutated Cas13d sequence, NES-Ga_0531(trunc)-NES-HA. This mutant has a deletion of the non-conserved N-terminus.

[0373] SEQ ID NO: 280 is a full-length Cas13d sequence, NLS-RfxCas13d-NLS-HA.

[0374] SEQ ID NO: 281 is a mutated Cas13d sequence, NLS-RfxCas13d(del5)-NLS-HA. This mutant has a deletion of amino acids 558-587.

[0375] SEQ ID NO: 282 is a mutated Cas13d sequence, NLS-RfxCas13d(del5.12)-NLS-HA. This mutant has a deletion of amino acids 558-587 and 953-966.

[0376] SEQ ID NO: 283 is a mutated Cas13d sequence, NLS-RfxCas13d(del5.13)-NLS-HA. This mutant has a deletion of amino acids 376-392 and 558-587.

[0377] SEQ ID NO: 284 is a mutated Cas13d sequence, NLS-RfxCas13d(del5.12+5.13)-NLS-HA. This mutant has a deletion of amino acids 376-392, 558-587, and 953-966.

[0378] SEQ ID NO: 285 is a mutated Cas13d sequence, NLS-RfxCas13d(dell3)-NLS-HA. This mutant has a deletion of amino acids 376-392.

[0379] SEQ ID NO: 286 is an effector sequence used to edit expression of ADAR2. Amino acids 1 to 969 are dRfxCas13, aa 970 to 991 are an NLS sequence, and amino acids 992 to 1378 are ADAR2DD.

[0380] SEQ ID NO: 287 is an exemplary HIV NES protein sequence.

[0381] SEQ ID NOS: 288-291 are exemplary Cas13d motif sequences.

[0382] SEQ ID NO: 292 is Cas13d ortholog sequence MH_4866.

[0383] SEQ ID NO: 293 is an exemplary Cas13d protein sequence from 037_-_emblOIZA01000315.11

[0384] SEQ ID NO: 294 is an exemplary Cas13d protein sequence from PIG-022 GL002635 1.

[0385] SEQ ID NO: 295 is an exemplary Cas13d protein sequence from PIG-046_GL0077813.

[0386] SEQ ID NO: 296 is an exemplary Cas13d protein sequence from pig_chimera.

[0387] SEQ ID NO: 297 is an exemplary nuclease-inactive or dead Cas13d (dCas13d) protein sequence from Ruminococcus flavefaciens XPD3002 (CasRx)

[0388] SEQ ID NO: 298 is an exemplary Cas13d protein sequence.

[0389] SEQ ID NO: 299 is an exemplary Cas13d protein sequence from (contig tpg|DJXD01000002.1|; uncultivated Ruminococcus assembly, UBA7013, from sheep gut metagenome).

[0390] SEQ ID NO: 300 is an exemplary Cas13d direct repeat nucleotide sequence from Cas13d (contig tpg|DJXD01000002.1|; uncultivated Ruminococcus assembly, UBA7013, from sheep gut metagenome (goes with SEQ ID NO: 299).

[0391] SEQ ID NO: 301 is an exemplary Cas13d protein contig emb|OBLI01020244.

[0392] Yan et al. (2018) Mol Cell. 70(2):327-339 (doi: 10.1016/j.molcel.2018.02.2018) and Konermann et al. (2018) Cell 173(3):665-676 (doi: 10.1016/j.cell/2018.02.033) have described Cas13d proteins and both of which are incorporated by reference herein in their entireties. Also see WO Publication Nos. WO2018/183403 (CasM, which is Cas13d) and WO2019/006471 (Cas13d), which are incorporated herein by reference in their entirety.

[0393] SEQ ID NO: 467 is an exemplary CasM protein from Eubacterium siraeum.

[0394] SEQ ID NO: 468 is an exemplary CasM protein from Ruminococcus sp., isolate 2789STDY5834971.

[0395] SEQ ID NO: 469 is an exemplary CasM protein from Ruminococcus bicirculans.

[0396] SEQ ID NO: 470 is an exemplary CasM protein from Ruminococcus sp., isolate 2789STDY5608892.

[0397] SEQ ID NO: 471 is an exemplary CasM protein from Ruminococcus sp. CAG:57.

[0398] SEQ ID NO: 472 is an exemplary CasM protein from Ruminococcus flavefaciens FD-1.

[0399] SEQ ID NO: 473 is an exemplary CasM protein from Ruminococcus albus strain KH2T6.

[0400] SEQ ID NO: 474 is an exemplary CasM protein from Ruminococcus flavefaciens strain XPD3002.

[0401] SEQ ID NO: 475 is an exemplary CasM protein from Ruminococcus sp., isolate 2789STDY5834894.

[0402] SEQ ID NO: 476 is an exemplary RtcB homolog.

[0403] SEQ ID NO: 477 is an exemplary WYL from Eubacterium siraeum+C-terminal NLS.

[0404] SEQ ID NO: 478 is an exemplary WYL from Ruminococcus sp. isolate 2789STDY5834971+C-term NLS.

[0405] SEQ ID NO: 479 is an exemplary WYL from Ruminococcus bicirculans+C-term NLS.

[0406] SEQ ID NO: 480 is an exemplary WYL from Ruminococcus sp. isolate 2789STDY5608892+C-term NLS.

[0407] SEQ ID NO: 481 is an exemplary WYL from Ruminococcus sp. CAG:57+C-term NLS.

[0408] SEQ ID NO: 482 is an exemplary WYL from Ruminococcus flavefaciens FD-1+C-term NLS.

[0409] SEQ ID NO: 483 is an exemplary WYL from Ruminococcus albus strain KH2T6+C-term NLS.

[0410] SEQ ID NO: 484 is an exemplary WYL from Ruminococcus flavefaciens strain XPD3002+C-term NLS.

[0411] SEQ ID NO: 485 is an exemplary RtcB from Eubacterium siraeum+C-term NLS.

[0412] Exemplary wild type Cas13d proteins of the disclosure may comprise or consist of the amino acid sequence SEQ ID NO: 92 or SEQ ID NO: 298 (Cas13d protein also known as CasRx).

[0413] An exemplary direct repeat sequence of Ruminococcus flavefaciens XPD3002 Cas13d (CasRx) comprises the nucleic acid sequence:

(SEQ ID NO: 461)
AACCCCTACCAACTGGTCGGGGTTTGAAAC.

### Therapeutic Replacement Genes (Corresponding Disease/Disorder to be Treated)

[0414] Compositions comprising therapeutic replacement genes disclosed herein include any effective gain-or-loss-of-function gene replacement therapies. Exemplary therapeutic replacement genes (corresponding diseases) include, without limitation, genes (diseases/disorders) such as rhodopsin (Retinitis Pigmentosa), PRPF3—Pre-mRNA Splicing Factor 3 (autosomal dominant Retinitis Pigmentosa), PRPF31 (autosomal dominant Retinitis Pigmentosa), GRN (Frontotemporal dementia (FTD)), SOD1 (ALS), PMP22 (Charcot Marie Tooth Disease), PABPN1 (Oculopharangeal Muscular Dystrophy), KCNQ4 (Hearing Loss), CLRN1 (Usher Syndrome), APOE2 (Alzheimer's Disease), APOE4 (Alzheimer's Disease), BEST1 (Eye Disease), MYBPC3 (Familial Cardiomyopathy), TNNT2 (Familial Cardiomyopathy), and TNNI3 (Familial Cardiomyopathy).

[0415] In some embodiments, therapeutic replacement genes are codon optimized. In some embodiments, the codons relevant to the target site are not codon optimized. In some embodiments, the RNA-targeting proteins of the disclosure ensure cleavage of the mutant allele but not cleavage of the transgene or therapeutic replacement gene.

[0416] Exemplary therapeutic replacement genes and corresponding sequences include, without limitation, the following:

### Rhodopsin (Human RHO)

[0417] Exemplary therapeutic replacement genes may comprise or consist of the amino acid sequence of Rhodopsin:

(SEQ ID NO: 302)
MNGTEGPNFYVPFSNATGVVRSPFEYPQYYLAEPWQFSMLAAYMFLLIVL
GFPINFLTLYVTVQHKKLRTPLNYILLNLAVADLFMVLGGFTSTLYTSLH
GYFVFGPTGCNLEGFFATLGGEIALWSLVVLAIERYVVVCKPMSNFRFGE
NHAIMGVAFTWVMALACAAPPLAGWSRYIPEGLQCSCGIDYYTLKPEVNN
ESFVIYMFVVHFFTIPMIIIFFCYGQLVFTVKFAAAQQQESATTQKAEKE
VTRMVIIMVIAFLICWVPYASVAFYIFTHQGSNFGPIFMTIPAFFAKSAA
IYNPVIYIMMNKQFRNCMLTTICCGKNPLGDDEASATVSKTETSQVAPA.

### Super Oxide Dismutase 1 (SOD1)

[0418] Exemplary therapeutic replacement genes may comprise or consist of the amino acid sequence of Super Oxide Dismutase 1:

(SEQ ID NO: 303)
MATKAVCVLKGDGPVQGIINFEQKESNGPVKVWGSIKGLTEGLHGFHHVH
EFGDNTAGCTSAGPHFNPLSRKHGGPKDEERHVGDLGNVTADKDGVADVS
IEDSVISGDHCIIGRTLVVHEKADDLGKGGNEESTKTGNAGSRLACCVIG
IAQ.

### Peripheral Myelin Protein 22 (PMP22)

[0419] Exemplary therapeutic replacement genes may comprise or consist of the amino acid sequence of Peripheral Myelin Protein 22:

(SEQ ID NO: 304)
MLLLLLSIINTLHVAVLVLLFVSTIVSQWIVGNGHATDLWQNCSTSSSGN
VHHCFSSSPNEWLQSVQATMILSIIFSILSLFLFFCQLFTLTKGGRFYIT
GIFQILAGLCVMSAAAIYTVRHPEWHLNSDYSYGFAYILAWVAFPLALLS
GVIYVILRKRE.

### Poly(A) Binding Protein Nuclear 1 (PABPN1)

[0420] Exemplary therapeutic replacement genes may comprise or consist of the amino acid sequence of Poly(A) Binding Protein Nuclear 1:

(SEQ ID NO: 305)
MAAAAAAAAAAGAAGGRGSGPGRRRHLVPGAGGEAGEGAPGGAGDYGNGL
ESEELEPEELLLFPEPEPEPEEEPPRPRAPPGAPGPGPGSGAPGSQEEEE
EPGLVEGDPGDGAIEDPELEAIKARVREMEEEAEKLKELQNEVEKOMNMS
PPPGNAGPVIMSIEEKMEADARSIYVGNVDYGATAEELEAHFHGCGSVNR
VTILCDKFSGHPKGFAYIEFSDKESVRTSLALDESLFRGRQIKVIPKRTN
RPGISTTDRGFPRARYRARTTNYNSSRSRFYSGFNSRPRGRVYRGRARAT
SWYSPY.

### Potassium Voltage-Gated Channel Subfamily Q Member 4 (KCNQ4)

[0421] Exemplary therapeutic replacement genes may comprise or consist of the amino acid sequence of Potassium Voltage-Gated Channel Subfamily Q Member 4:

(SEQ ID NO: 306)
[sequence omitted]

### Clarin 1 (CLRN1)

[0422] Exemplary therapeutic replacement genes may comprise or consist of the amino acid sequence of Clarin 1:

(SEQ ID NO: 307)
MPSQQKKIIFCMAGVFSFACALGVVTALGTPLWIKATVLCKTGALLVNAS
GQELDKFMGEMQYGLFHGEGVRQCGLGARPFRFSFFPDLLKAIPVSIHVN
VILFSAILIVLTMVGTAFFMYNAFGKPFETLHGPLGLYLLSFISGSCGCL
VMILFASEVKIHEILSEKIANYKEGTYVYKTQSEKYTTSFWVIFFCFFVH
FLNGLLIRLAGFQFPFAKSKDAETTNVAADLM.

### Apolipoprotein 2 (APOE2)

[0423] Exemplary therapeutic replacement genes may comprise or consist of the amino acid sequence of Apolipoprotein 2.

(SEQ ID NO: 308)
MKVLWAALLVTFLAGCQAKVEQAVETEPEPELRQQTEWQSGQRWELALGR
FWDYLRWVQTLSEQVQEELLSSQVTQELRALMDETMKELKAYKSELEEQL
TPVAEETRARLSKELQAAQARLGADMEDVCGRLVQYRGEVQANILGQSTE
ELRVRLASHLRKLRKRLLRDADDLQKCLAVYQAGAREGAERGLSAIRERL
GPLVEQGRVRAATVGSLAGQPLQERAQAWGERLRARMEEMGSRTRDRLDE
VKEQVAEVRAKLEEQAQQIRLQAEAFQARLKSWFEPLVEDMQRQWAGLVE
KVQAAVGTSAAPVPSDNH.

### Apolipoprotein 4 (APOE4)

[0424] Exemplary therapeutic replacement genes may comprise or consist of the amino acid sequence of Apolipoprotein 4:

(SEQ ID NO: 309)
[sequence omitted]

### Bestrophin-1 (BEST1)

[0425] Exemplary therapeutic replacement genes may comprise or consist of the amino acid sequence of Bestrophin-1:

(SEQ ID NO: 310)
MTITYTSQVANARLGSFSRLLLCWRGSIYKLLYGEFLIFLLCYYIIRFIY
RLALTEEQQLMFEKLTLYCDSYIQLIPISFVLGFYVTLVVTRWWNQYENL
PWPDRLMSLVSGFVEGKDEQGRLLRRTLIRYANLGNVLILRSVSTAVYKR
FPSAQHLVQAGFMTPAEHKQLEKLSLPHNMFWVPWVWFANLSMKAWLGGR
IRDPILLQSLLNEMNTLRTQCGHLYAYDWISIPLVYTQVVTVAVYSEELT
CLVGRQFLNPAKAYPGHELDLVVPVFTFLQFFFYVGWLKVAEQLINPFGE
DDDDFETNWIVDRNLQVSLLAVDEMHQDLPRMEPDMYWNKPEPQPPYTAA
SAQFRRASFMGSTENTSLNKEEMEFQPNQEDEEDAHAGIIGRFLGLQSHD
HHPPRANSRTKLLWPKRESLLHEGLPKNHKAAKQNVRGQEDNKAWKLKAV
DAFKSAPLYQRPGYYSAPQTPLSPTPMFFPLEPSAPSKLHSVTGIDTKDK
SLKTVSSGAKKSFELLSESDGALMEHPEVSQVRRKTVEFNLTDMPEIPEN
HLKEPLEQSPTNIHTTLKDHMDPYWALENRDEAHS.

### Cardiac Myosin-Binding Protein-C(MYBPC3)

[0426] Exemplary therapeutic replacement genes may comprise or consist of the amino acid sequence of Cardiac Myosin-Binding Protein-C:

(SEQ ID NO: 311)
MPEPGKKPVSAFSKKPRSVEVAAGSPAVFEAETERAGVKVRWQRGGSDIS
ASNKYGLATEGTRHTLTVREVGPADQGSYAVIAGSSKVKFDLKVIEAEKA
EPMLAPAPAPAEATGAPGEAPAPAAELGESAPSPKGSSSAALNGPTPGAP
DDPIGLFVMRPQDGEVTVGGSITFSARVAGASLLKPPVVKWFKGKWVDLS
SKVGQHLQLHDSYDRASKVYLFELHITDAQPAFTGSYRCEVSTKDKFDCS
NFNLTVHEAMGTGDLDLLSAFRRTSLAGGGRRISDSHEDTGILDFSSLLK
KRDSFRTPRDSKLEAPAEEDVWEILRQAPPSEYERIAFQYGVTDLRGMLK
RLKGMRRDEKKSTAFQKKLEPAYQVSKGHKIRLTVELADHDAEVKWLKNG
QEIQMSGSKYIFESIGAKRTLTISQCSLADDAAYQCVVGGEKCSTELEVK
EPPVLITRPLEDQLVMVGQRVEFECEVSEEGAQVKWLKDGVELTREETFK
YRFKKDGQRHHLIINEAMLEDAGHYALCTSGGQALAELIVQEKKLEVYQS
IADLMVGAKDQAVFKCEVSDENVRGVWLKNGKELVPDSRIKVSHIGRVHK
LTIDDVTPADEADYSFVPEGFACNLSAKLHFMEVKIDFVPRQEPPKIHLD
CPGRIPDTIVVVAGNKLRLDVPISGDPAPTVIWQKAITQGNKAPARPAPD
APEDTGDSDEWVFDKKLLCETEGRVRVETTKDRSIFTVEGAEKEDEGVYT
VTVKNPVGEDQVNLTVKVIDVPDAPAAPKISNVGEDSCTVQWEPPAYDGG
QPILGYILERKKKKSYRWMRLNFDLIQELSHEARRMIEGVVYEMRVYAVN
AIGMSRPSPASQPFMPIGPPSEPTHLAVEDVSDTTVSLKWRPPERVGAGG
LDGYSVEYCPEGCSEWVAALQGLTEHTSILVKDLPTGARLLFRVRAHNMA
GPGAPVTTTEPVTVQEILQRPRLQLPRHLRQTIQKKVGEPVNLLIPFQGK
PRPQVTWTKEGQPLAGEEVSIRNSPTDTILFIRAARRVHSGTYQVTVRIE
NMEDKATLVLQVVDKPSPPQDLRVTDAWGLNVALEWKPPQDVGNTELWGY
TVQKADKKTMEWFTVLEHYRRTHCVVPELIIGNGYYFRVFSQNMVGFSDR
AATTKEPVFIPRPGITYEPPNYKALDFSEAPSFTQPLVNRSVIAGYTAML
CCAVRGSPKPKISWFKNGLDLGEDARFRMFSKQGVLTLEIRKPCPFDGGI
YVCRATNLQGEARCECRLEVRVPQ.

### Cardiac Troponin T2 (TNNT2)

[0427] Exemplary therapeutic replacement genes may comprise or consist of the amino acid sequence of Cardiac Troponin T2:

(SEQ ID NO: 312)
MSDEEVEQVEEQYEEEEEAQEEAAEVHEEVHEPEEVQEDTAEEDAEEEKP
RPKLTAPKIPEGEKVDFDDIQKKRQNKDLMELQALIDSHFEARKKEEEEL
VALKERIEKRRAERAEQQRIRAEKERERQNRLAEEKARREEEDAKRRAED
DLKKKKALSSMGANYSSYLAKADQKRGKKQTAREMKKKILAERRKPLNID
HLGEDKLRDKAKELWETLHQLEIDKFEFGEKLKRQKYDITTLRSRIDQAQ
KHSKKAGTPAKGKVGGRWK.

### Cardiac Troponin TI3 (TNNI3)

[0428] Exemplary therapeutic replacement genes nay comprise or consist of the amino acid sequence of Cardiac Troponin TI3.

(SEQ ID NO: 313)
MADGSSDAAREPRPAPAPIRRRSSNYRAYATEPHAKKKSKISASRKLQLK
TLLLQIAKQELEREAEERRGEKGRALSTRCQPLELAGLGFAELQDLCRQL
HARVDKVDEERYDIEAKVTKNITEIADLTQKIFDLRGKFKRPTLRRVRIS
ADAMMQALLGARAKESLDLRAHLKQVKKEDTEKENREVGDWRKNIDALSG
MEGRKKKFES

Pre-mRNA processing factor 31 (PRPF31)

[0429] Exemplary therapeutic replacement genes may comprise or consist of the amino acid sequence of pre-mRNA processing factor 31 (PRPF31) (autosomal dominant Retinitis Pigmentosa):

(SEQ ID NO: 487)
MSLADELLADLEEAAEEEEGGSYGEEEEEPAIEDVQEETQLDLSGDSVKT
IAKLWDSKMFAEIMMKIEEYISKQAKASEVMGPVEAAPEYRVIVDANNLT
VEIENELNIIHKFIRDKYSKRFPELESLVPNALDYIRTVKELGNSLDKCK
NNENLQQILTNATIMVVSVTASTTQGQQLSEEELERLEEACDMALELNAS
KHRIYEYVESRMSFIAPNLSIIIGASTAAKIMGVAGGLTNLSKMPACNIM
LLGAQRKTLSGFSSTSVLPHTGYIYHSDIVQSLPPDLRRKAARLVAAKCT
LAARVDSFHESTEGKVGYELKDEIERKFDKWQEPPPVKQVKPLPAPLDGQ
RKKRGGRRYRKMKERLGLTEIRKQANRMSFGEIEEDAYQEDLGFSLGHLG
KSGSGRVRQTQVNEATKARISKTLQRTLQKQSVVYGGKSTIRDRSSGTAS
SVAFTPLQGLEIVNPQAAEKKVAEANQKYFSSMAEELKVKGEKSGLMST.

### Progranulin (GRN) (FTD)

[0430] Exemplary therapeutic replacement genes may comprise or consist of the amino acid sequence of Progranulin (GRN) (frontotemporal dementia (FTD)):

(SEQ ID NO: 488)
MWTLVSWVALTAGLVAGTRCPDGQFCPVACCLDPGGASYSCCRPLLDKWP
TTLSRHLGGPCQVDAHCSAGHSCIFTVSGTSSCCPFPEAVACGDGHHCCP
RGFHCSADGRSCFQRSGNNSVGAIQCPDSQFECPDFSTCCVMVDGSWGCC
PMPQASCCEDRVHCCPHGAFCDLVHTRCITPTGTHPLAKKLPAQRTNRAV
ALSSSVMCPDARSRCPDGSTCCELPSGKYGCCPMPNATCCSDHLHCCPQD
TVCDLIQSKCLSKENATTDLLTKLPAHTVGDVKCDMEVSCPDGYTCCRLQ
SGAWGCCPFTQAVCCEDHIHCCPAGFTCDTQKGTCEQGPHQVPWMEKAPA
HLSLPDPQALKRDVPCDNVSSCPSSDTCCQLTSGEWGCCPIPEAVCCSDH
QHCCPQGYTCVAEGQCQRGSEIVAGLEKMPARRASLSHPRDIGCDQHTSC
PVGQTCCPSLGGSWACCQLPHAVCCEDRQHCCPAGYTCNVKARSCEKEVV
SAQPATFLARSPHVGKDVECGEGHFCHDNQTCCRDNRQGWACCPYRQGVC
CADRRHCCPAGFRCAARGTKCLRREAPRWDAPLRDPALRQLL.

gRNA Target Sequences

[0431] In some embodiments of the compositions of the disclosure, a target sequence of an RNA molecule comprises a pathogenic sequence. In some embodiments, the target RNA comprises a sequence motif corresponding to the spacer sequence of the guide RNA of the RNA-guided RNA-binding protein. In some embodiments, one or more spacer sequences are used to target one or more target sequences. In some embodiments, multiple spacers are used to target multiple target RNAs. Such target RNAs can be different target sites within the same RNA molecule or can be different target sites within different RNA molecules. Spacer sequences can also target non-coding RNA. In some embodiments, multiple promoters, e.g., pol III promoters) can be used to drive multiple spacers in a gRNA for targeting multiple target RNAs. In some embodiments, when the target RNA(s) or target sequence motif(s) is/are targeted and knocked down by the RNA-targeting compositions disclosed herein, then pathogenic or disease-causing gain-or-loss-of-function mutations are destroyed.

[0432] In some embodiments of the compositions and methods of the disclosure, the sequence motif of the target RNA is a signature of a disease or disorder.

[0433] A sequence motif of the disclosure may be isolated or derived from a sequence of foreign or exogenous sequence found in a genomic sequence, and therefore translated into an mRNA molecule of the disclosure or a sequence of foreign or exogenous sequence found in an RNA sequence of the disclosure.

[0434] A target sequence motif of the disclosure may comprise, consist of, be situated by, or be associated with a mutation in an endogenous sequence that causes a disease or disorder. The mutation may comprise or consist of a sequence substitution, inversion, deletion, insertion, transposition, or any combination thereof.

[0435] A target sequence motif of the disclosure may comprise or consist of a repeated sequence. In some embodiments, the repeated sequence may be associated with a microsatellite instability (MSI). MSI at one or more loci results from impaired DNA mismatch repair mechanisms of a cell of the disclosure. A hypervariable sequence of DNA may be transcribed into an mRNA of the disclosure comprising a target sequence comprising or consisting of the hypervariable sequence.

[0436] A target sequence motif of the disclosure may comprise or consist of a biomarker. The biomarker may indicate a risk of developing a disease or disorder. The biomarker may indicate a healthy gene (low or no determinable risk of developing a disease or disorder. The biomarker may indicate an edited gene. Exemplary biomarkers include, but are not limited to, single nucleotide polymorphisms (SNPs), sequence variations or mutations, epigenetic marks, splice acceptor sites, exogenous sequences, heterologous sequences, and any combination thereof.

[0437] A target sequence motif of the disclosure may comprise or consist of a secondary, tertiary or quaternary structure. The secondary, tertiary or quaternary structure may be endogenous or naturally occurring. The secondary, tertiary or quaternary structure may be induced or non-naturally occurring. The secondary, tertiary or quaternary structure may be encoded by an endogenous, exogenous, or heterologous sequence.

[0438] In some embodiments of the compositions and methods of the disclosure, a target sequence of an RNA molecule comprises or consists of between 2 and 100 nucleotides or nucleic acid bases, inclusive of the endpoints. In some embodiments, the target sequence of an RNA molecule comprises or consists of between 2 and 50 nucleotides or nucleic acid bases, inclusive of the endpoints. In some embodiments, the target sequence of an RNA molecule comprises or consists of between 2 and 20 nucleotides or nucleic acid bases, inclusive of the endpoints. In some embodiments, the target sequence of an RNA molecule comprises or consists of between 20-30 nucleotides or nucleic acid bases, inclusive of the endpoints. In some embodiments, the target sequence of an RNA molecule comprises or consists of about 26 nucleotides or nucleic acid bases, inclusive of the endpoints.

[0439] In some embodiments of the compositions and methods of the disclosure, a target sequence of an RNA molecule is continuous. In some embodiments, the target sequence of an RNA molecule is discontinuous. For example, the target sequence of an RNA molecule may comprise or consist of one or more nucleotides or nucleic acid bases that are not contiguous because one or more intermittent nucleotides are positioned in between the nucleotides of the target sequence.

[0440] In some embodiments of the compositions and methods of the disclosure, a target sequence of an RNA molecule is naturally occurring. In some embodiments, the target sequence of an RNA molecule is non-naturally occurring. Exemplary non-naturally occurring target sequences may comprise or consist of sequence variations or mutations, chimeric sequences, exogenous sequences, heterologous sequences, chimeric sequences, recombinant sequences, sequences comprising a modified or synthetic nucleotide or any combination thereof.

[0441] In some embodiments of the compositions and methods of the disclosure, a target sequence of an RNA molecule binds to a guide RNA of the disclosure. In some embodiments of the compositions and methods of the disclosure, one or more target sequences of an RNA molecule binds to one or more guide RNA spacer sequences of the disclosure.

[0442] In some embodiments of the compositions and methods of the disclosure, a target sequence of an RNA molecule binds to a first RNA binding protein of the disclosure.

[0443] In some embodiments of the compositions and methods of the disclosure, a target sequence of an RNA molecule binds to a second RNA binding protein of the disclosure.

[0444] Compositions of the disclosure may comprise a gRNA comprising a spacer sequence that specifically binds to a target sequence of an RNA molecule encoding Rhodospin protein comprising or consisting of about 20-30 nucleotides of the sequence of:

| (SEQ ID NO: 314) | |
|---|---|
| TGGGGTTTTT CCCATTCCCA GGACTGCCTC CTCCACCTCT AGCCCCAGGG GACTCTGTGC | 60 |
| TGCTTGGCTC TGCTCATTGC TCAATCCAGC CATCCCAGGG TCAGGGATCA GGTGGAAGCT | 120 |
| GGCAGTTTCA ATCTATCCTG TGGATAGAGT GTGAAAGCAA CAAAACCCAC CACCGTTAAT | 180 |
| ACCAACATAG GAGCTGAGCT TTTAATGGCC CAATTTGCCT TAGTCTCCAG GCAGAGCTGG | 240 |
| GTAAAGCTAG AGCTTCTGGC TTTGCTTATA TGGAGAAGGG GGAGCAGTTA CTGAGGCAGC | 300 |
| TTAATTCTGA CACCTCAGAG ATGTGGCCAG CTTTTTGGAG CAGATTCTCC AGAATGGAGA | 360 |
| ATGGACTAGC AACTGCTGAA GATGGGCTTG TCTGGCAAGG GAAACTGGAA ACTGGGGCCC | 420 |
| ATGAACATCC CCAAGGAAGG TAGGCCCAGT GGAATTTCCC ACTCTTTGTT TCTAAGCTCT | 480 |
| TCGAGATAAG GATGACATCA GGGACTCAGC TGTTAATTAA ATGTGGGCGG GTGAGCATGG | 540 |
| CTTCTAGAGG CTCCATGCTC TAGATGCTGG GACCCAGGTG CTAGAGCAAA AGAGCAGGTG | 600 |
| GCTTCCAGAG GCTGAGAGAA AGGCCTGTCT CTCCATAGGC CACATTGGGA AGGGGAGGCA | 660 |
| CGGGACCTGG GGCCCCACAC TAGGGGTGAG ACCCCAGGCC CAATCTCACC CTCATTGGGA | 720 |
| ACTTGGCCTT CACCGTCCCC CTCCCCCAGT GTTGTTTTTT CAGGTCTGAT GACTGCATTC | 780 |
| TGCATTCCTG TGACTGTCCC TGCCTACAGC CCAACCCCCA GCCCTGGTCT GGCCTTGATG | 840 |
| CCTAGCTAAT TTTTAAAAAC CTGCCCCAAG GTTGGGTGAA ACCCCATCAT CTGAATGCCC | 900 |
| AATCTCAAAA TGTTCACTAT CAGGAGGTGA TAATCATAGT AATTAACTAG TTACATTAAT | 960 |
| TGATGTTATT CACAACATTA ACTAGAATCT GTACAGCTTC TTGCTATTTA CAAAGTGCTG | 1020 |
| AAACACACAC ATAGACACAC ACACACCTCT TTTGGTCTTC TCAGTAGCTG CGTGTCGGCA | 1080 |
| GGACCAGGGA TCTGGGATTT CCATTTTATA GGAGAAGAAA GTGAGGCCCA GGGAGGGAAA | 1140 |
| AACAACTGCT CCATATCATT AGCCAAGTAT GAGTTGCTGC TGCTGCGAGG GTCTGAGAGG | 1200 |
| ATAGATATGT TCTCCCTTCC CATTCATTCC TCCATTCCTT CCTGCATCCA TCCAGCATTT | 1260 |
| ATTAAGCACC TACTGTGTGC CCCATTCTGT GCTAGACACT TATCCCTAAG CTGGGACACT | 1320 |
| TTTCCAGAAA GCAAGAATCC TCGTGTTCCT GAAAGATGAG TTGGGAGGAG GAGGGGCACA | 1380 |
| CATCCCGCTG GCCTTGGGGA ACGTGGGACT CCAGATCAGT AGGTCTTGGT GGATGTCCCT | 1440 |
| TCTCAGGCTG TCCCAGGTGA GTGAGGAGCC TCATTAATTA TTTCTTAAAA AAAAAAAAAA | 1500 |
| AATTAAGGAG CCTATGTGAC TTCGTTCATT CTGCACAGGC GCTGCTCCTG GTGGGATGGC | 1560 |
| TGTGGCTGGG GGAAGGTGTA GGGGATGGGA GACGCCTATA GTCGGCCACA GAGTCCTAGG | 1620 |
| CAGGTCTTAG GCCGGGGCCA CCTGGCTCGT CTCCGTCTTG GACACGGTAG CAGAGGCCTC | 1680 |
| ATCGTCACCC AGTGGGTTCT TGCCGCAGCA GATGGTGGTG AGCATGCAGT TCCGGAACTG | 1740 |
| CTTGTTCATC ATGATATAGA TGACAGGGTT GTAGATGGCG GCGCTCTTGG CAAAGAACGC | 1800 |
| TGGGATGGTC ATGAAGATGG GACCGAAGTT GGAGCCCTGG TGGGTGAAGA TGTAGAATGC | 1860 |
| CACGCTGGCG TAGGGCACCC AGCAGATCAG GAAAGCGATG ACCATGATGA TGACCATGCG | 1920 |
| GGTGACCTCC TTCTCTGCCT TCTGTGTGGT GGCTGACTCC TGCTGCTGGG CAGCGGCCTC | 1980 |
| CTTGACGGTG AAGACGAGCT GCCCATAGCA GAAAAAGATG ATAATCATGG GGATGGTGAA | 2040 |
| GTGGACCACG AACATGTAGA TGACAAAAGA CTCGTTGTTG ACCTCCGGCT TGAGCGTGTA | 2100 |
| GTAGTCGATT CCACACGAGC ACTGCAGGCC CTCGGGGATG TACCTGGACC AGCCGGCGAG | 2160 |
| TGGGGGTGCG GCGCAGGCCA GCGCCATGAC CCAGGTGAAG GCAACGCCCA TGATGGCATG | 2220 |
| GTTCTCCCCG AAGCGGAAGT TGCTCATGGG CTTACACACC ACCACGTACC GCTCGATGGC | 2280 |
| CAGGACCACC AAGGACCACA GGGCAATTTC ACCGCCCAGG GTGGCAAAGA AGCCCTCCAA | 2340 |
| ATTGCATCCT GTGGGCCCGA AGACGAAGTA TCCATGCAGA GAGGTGTAGA GGGTGCTGGT | 2400 |
| GAAGCCACCT AGGACCATGA AGAGGTCAGC CACGGCTAGG TTGAGCAGGA TGTAGTTGAG | 2460 |
| AGGCGTGCGC AGCTTCTTGT GCTGGACGGT GACGTAGAGC GTGAGGAAGT TGATGGGGAA | 2520 |
| GCCCAGCACG ATCAGCAGAA ACATGTAGGC GGCCAGCATG GAGAACTGCC ATGGCTCAGC | 2580 |
| CAGGTAGTAC TGTGGGTACT CGAAGGGGCT GCGTACCACA CCCGTCGCAT TGGAGAAGGG | 2640 |
| CACGTAGAAG TTAGGGCCTT CTGTGCCATT CATGGCTGTG GCCCTTGTGG CTGACCCGTG | 2700 |
| GCTGCTCCCA CCCAAGAATG CTGCGAAGGC CTGAGCTCAG CCACTCAGGG CTCCAGCTGG | 2760 |
| ATGACTCT | 2768. |

[0445] Exemplary gRNA spacer sequences of the disclosure that specifically bind to a target sequence of an RNA molecule encoding a Rhodopsin protein of the disclosure may comprise or consist of a nucleic acid having a sequence selected from any one of any one of SEQ ID NO: 619 to SEQ ID NO: 3361.

[0446] In some embodiments, exemplary gRNA spacer sequences and corresponding Rho target sequences comprises or consists of the sequences as detailed in table 1.

TABLE 1
Spacer sequences and target sequences
used for Rhodopsin targeting

| Spacer | Spacer Sequences | Target Sequences |
|---|---|---|
| Rho | ACATGTAGATGACAAA | CAACGAGTCTTTTGTC |
| guide 1 | AGACTCGTTG | ATCTACATGT |
| | (SEQ ID NO: 465) | (SEQ ID NO: 462) |
| Rho | TGAAGATGTAGAATGC | CGCCAGCGTGGCATTC |
| guide 2 | CACGCTGGCG | TACATCTTCA |
| | (SEQ ID NO: 409) | (SEQ ID NO: 463) |
| Rho | ACTGCTTGTTCATCAT | CATCTATATCATGATG |
| guide 3 | GATATAGATG | AACAAGCAGT |
| | (SEQ ID NO: 466) | (SEQ ID NO: 464) |

[0447] Compositions of the disclosure may comprise a gRNA comprising a spacer sequence that specifically binds to a target sequence of an RNA molecule encoding SOD1 protein comprising or consisting of about 20-30 nucleotides of the sequence of:

| (SEQ ID NO: 315) | |
|---|---|
| tttttttttt ttttttttag tttgaatttg gattctttta atagcctcat aataagtgcc | 60 |
| atacagggtt tttattcaca ggcttgaatg acaaagaaat tctgacaagt ttaataccca | 120 |
| tctgtgattt aagtctggca aaatacaggt cattgaaaca gacattttaa ctgagtttta | 180 |
| taaaactata caaatcttcc aagtgatcat aaatcagttt ctcactacag gtactttaaa | 240 |
| gcaactctga aaaagtcaca caattacact tttaagatta cagtgtttaa tgtttatcag | 300 |
| gatacatttc tacagctagc aggataacag atgagttaag gggcctcaga ctacatccaa | 360 |
| gggaatgttt attgggcgat cccaattaca ccacaagcca aacgacttcc agcgtttcct | 420 |
| gtctttgtac tttcttcatt tccacctttg cccaagtcat ctgctttttc atggaccacc | 480 |
| agtgtgcggc caatgatgca atggtctcct gagagtgaga tcacagaatc ttcaatagac | 540 |
| acatcggcca caccatcttt gtcagcagtc acattgccca agtctccaac atgcctctct | 600 |
| tcatcctttg gcccaccgtg ttttctggat agaggattaa agtgaggacc tgcactggta | 660 |
| cagcctgctg tattatctcc aaactcatga acatggaatc catgcaggcc ttcagtcagt | 720 |
| cctttaatgc ttccccacac cttcactggt ccattacttt ccttctgctc gaaattgatg | 780 |
| atgccctgca ctgggccgtc gcccttcagc acgcacacgg ccttcgtcgc cataactcgc | 840 |
| taggccacgc cgaggtcctg gttccgagga ctgcaacgga aaccccagac gctgcaggag | 900 |
| actacgacgc aaaccagcac cccgtctccg cgactacttt ataggccaga cctccgcgcc | 960 |
| tcgcccactc tggccccaaa c | 981. |

[0448] Exemplary gRNA spacer sequences of the disclosure that specifically bind to a target sequence of an RNA molecule encoding a SOD protein of the disclosure may comprise or consist of a nucleic acid having a sequence selected from any one of any one of SEQ ID NO: 3362 to SEQ ID NO: 4317.

[0449] Compositions of the disclosure may comprise a gRNA comprising a spacer sequence that specifically binds to a target sequence of an RNA molecule encoding PMP22 protein comprising or consisting of about 20-30 nucleotides of the sequence of:

| (SEQ ID NO: 316) | |
|---|---|
| TGAGTTACTC TGATGTTTAT TTTAATGCAT CTTAGTCCAC ACAGTTGGTA TAAAATCAGA | 60 |
| AAATGCAAAG CAAAAACAAA AGGTCTGGAG TCTTAGCATC AGAAGGGCAC CATATATACA | 120 |
| TCTACAGTTG GTGGCCAATA CAAGTCATTG CCAGACAGTC CTTGGAGGCA CAGAACAGCC | 180 |
| TAGACCCAGC CAAGCTCTAG GAACTCACGG TCCCAAGGAG TCTAGACGCT TGTTCTGATG | 240 |
| CTCCGACCGT AAGAAAAATG TGGGAGTGAT GAAGGCTTTA TGATTTACTC ATTATAGTAA | 300 |
| TAATAGCAGC CTAGCTAGGT ACAAAAGCAG TTATAAACCA TTTATATTAC ACAGAATTAT | 360 |
| TCAGGTCTCC ATTCTATCTT ATGTTGTAAA ATTGTTAATT GGATTTCCAG TGAGTTGTTT | 420 |
| AGATGATTAG TGATAATAAG GAATGGTAAA TCCATAGCAC CATTTCAAAG ACTTGTTGTC | 480 |
| ACTGATTTCT CATTTAGATG TGTGACGAAG ATACTCCACC TGTAAGGGCA AGTATGCCAA | 540 |
| TGCCACAAGC CGTGTTTTTG CAAGGGCTCC AGTTTGGGCA TTTTGTCCGT GTGCGCGTAA | 600 |
| AGCTTCACAC AGAGGTTCGG GCAGCGGCTG TTTCTGTTGG ATGCACTGGG TCACCCACCA | 660 |
| GAAAAGGGCT TTTGGACATT TGGGGTTTCT ACCCACACTT TGGTTTTCTA AATGAGGTGG | 720 |
| ACTGGGAGGG AGGTATCTTC TTTCAGATGA AAGGGAAGGG GCGAGATGGA GTTATCTTAT | 780 |
| TTCTGGGTAA AACAAAACAA ACAAACAAAA AACAAAACAA AAATACTGAG CTGGATTATA | 840 |
| CTGTTAGGAT GTAAAGTTCC TTAGCTACTT CTTTAAGGCT CAACACGAGG CTGATGGTCA | 900 |
| ACATAAAAAG CAAACAATAC TATGTACATA TATGTAAAAA GTGTTATAAA TAGGTTTTAT | 960 |
| AAACCGGAGA TATTATATAC ATCTTCAATC AACAGCAACC CCCACCTCCA CTGCTTTCTG | 1020 |
| TTTGGTTTGG TTTGAGTTTG GGATTTTGGG CTAGCTCTTT TTTCTTTGTC TGCTTTCTGT | 1080 |
| TTTCCCTTCC TCCCTTCCCT ATGTACGCTC AGAGCCTCAG ACAGACCGTC TGGGCGCCTC | 1140 |
| ATTCGCGTTT CCGCAAGATC ACATAGATGA CACCGCTGAG AAGGGCCAGG GGGAAGGCCA | 1200 |
| CCCAGGCCAG GATGTAGGCG AAACCGTAGG AGTAATCCGA GTTGAGATGC CACTCCGGGT | 1260 |
| GCCTCACCGT GTAGATGGCC GCAGCACTCA TCACGCACAG ACCAGCAAGA ATTTGGAAGA | 1320 |
| TTCCAGTGAT GTAAAACCTG CCCCCCTTGG TGAGGGTGAA GAGTTGGCAG AAGAACAGGA | 1380 |
| ACAGAGACAG AATGCTGAAG ATGATCGACA GGATCATGGT GGCCTGGACA GACTGCAGCC | 1440 |
| ATTCGTTTGG TGATGATGAG AAACAGTGGT GGACATTTCC TGAGGAAGAG GTGCTACAGT | 1500 |
| TCTGCCAGAG ATCAGTTGCG TGTCCATTGC CCACGATCCA TTGGCTGACG ATCGTGGAGA | 1560 |
| CGAACAGCAG CACCAGCACC GCGACGTGGA GGACGATGAT ACTCAGCAAC AGGAGGAGCA | 1620 |
| TTCTGGCGGC AAGTTCTGCT CAGCGGAGTT TCTGCCCGGC CAAACAGCGT AACCCCTTCT | 1680 |
| TCCAAGCAGA TTTCTTTGCA GCCAAATGCA AGGGATGTTA AGGCAAGACC CTCCCCACAG | 1740 |
| GGCAGTCAGA GACCCGCAGC CGACAGACTA AGCCTGCAGC TTCCAACCAG GCTCCCCGAG | 1800 |
| ATGTTCCCTG GTGGTGCTCC CTGTAACT | 1828. |

[0450] Exemplary gRNA spacer sequences of the disclosure that specifically bind to a target sequence of an RNA molecule encoding a PMP22 protein of the disclosure may comprise or consist of a nucleic acid having a sequence selected from any one of any one of SEQ ID NO: 4318 to SEQ ID NO: 6120.

[0451] Compositions of the disclosure may comprise a gRNA comprising a spacer sequence that specifically binds to a target sequence of an RNA molecule encoding PABPN1 protein comprising or consisting of about 20-30 nucleotides of the sequence of:

| (SEQ ID NO: 317) | |
|---|---|
| TTTTTTTTTT TTTTTTTTAC ACCCAAAAGG CCAAACAATT TTTATTTTCA AAAACAACTT | 60 |
| TATTCATGAC ACATATTAAA AAAAAATTCC CACCCCTGGA AATGAGCTAA AAAAATAAAC | 120 |
| AAAATCCACC TCCCACCTCC CTGTTCCCAC TTCCTCCCAT TCCCTCCAAA TAAAAGGGAA | 180 |
| AAAAGGCAAA GGAAAAAAAA AAAAAACAAA AAAACAAAAC AACTGAAAAA CAAAAACACC | 240 |
| CCTAAACCCC CCAAAACAAG GTAGTGCATT TCCCCAGGGG GAAGGGGAAT TTACACTGGA | 300 |
| GCCGCTGGGA GCGGAACGGA GATCTTCCGG CTACAGAAAC CTGCAAAGAA AGACACTCAA | 360 |
| AACAGAAAAA GAAACACAAA AGGAAACAAA ATAGATCACC AGGCAATCTG GAGGGGCAGG | 420 |
| GAGCCGGAGA AGAGGGGTGG GGTGGGTGGT AGACCTGGCT GGACAGGAGC AGGCAGGAGG | 480 |
| GGACTGTGAA AGGCGAGGAG AAGACGGAGG GAAGGTAACA AGCAGAACAG TTTGGTGTCC | 540 |
| TTCCAGAGCC CTGGGTAAAA AAAAAAACCT CCTACCACCC ACGCCCACCT ACCCTTGAGC | 600 |
| AGCCCCCAAG GGGGTGAAGT GGGGCAGGGA AACATGGGCA GCAGCTTGCG CAGTTGAGAC | 660 |
| GTGTCCATGG CGAATCCCCA GAGTGAATAA GCAGCCCCCT GCCCCACTCC CTGGGCCTTC | 720 |
| CCCTACTCCC CAAAGCAGGT CCCTCCTCAG CAGTTAGTTA TGGGATTCTC CCCCCTTCCA | 780 |
| CAGTATATCT TTTTTTTAAA AAATATTTTT TTTCCATCAA GGTCATCTTC TGTTTTTCTT | 840 |
| TTTTTTTTTT TTAATTCTTT TTTTTTTCCT TCTTTCCTCT TTTTTTCCTC TCTCTCCTCC | 900 |
| TAATACACAC TTTTTTTAGT AAGGGGAATA CCATGATGTC GCTCTAGCCC GGCCCCTGTA | 960 |
| GACGCGACCC CGGGGCCTGC TGTTAAAACC ACTGTAGAAT CGAGAGCGGG AGCTGTTGTA | 1020 |
| GTTGGTGGTC CGGGCGCGGT AGCGGGCTCG TGGAAAACCC CGGTCTGTTG TGCTGATGCC | 1080 |
| TGGTCTGTTG GTTCGTTTTG GGATCACCTT GATTTGCCTT CCTCTAAATA GGGACTCATC | 1140 |
| TAAGGCCAAG GAAGTCCTCA CTGACTCTTT GTCTGAGAAC TCTATATACG CAAACCCTTT | 1200 |
| GGGATGGCCA CTAAATTTGT CACACAGTAT GGTAACACGG TTGACTGAAC CACAGCCATG | 1260 |
| AAAGTGAGCT TCCAGCTCTT CTGCTGTTGC ACCATAGTCC ACATTGCCAA CATAGATGGA | 1320 |
| ACGGGCATCA GCCTCCATCT TCTCCTCAAT GGACATGATC ACCGGGCCAG CATTGCCTGG | 1380 |
| AGGTGGACTC ATATTCATCT GCTTCTCTAC CTCGTTCTGT AGCTCCTTTA GCTTCTCAGC | 1440 |
| TTCTTCCTCC ATCTCCCTGA CTCGAGCTTT GATAGCTTCC AGCTCCGGGT CCTCAATGGC | 1500 |
| GCCGTCCCCC GGGTCACCCT CGACCAGTCC CGGCTCCTCC TCCTCCTCTT GGCTGCCGGG | 1560 |
| GGCTCCCGAA CCAGGCCCAG GGCCCGGAGC TCCCGGGGGG GCGCGGGGCC GGGGCGGCTC | 1620 |
| CTCTTCGGGC TCGGGCTCCG GCTCGGGCTC CAGCAGCAGC TCCTCAGGCT CCAGTTCCTC | 1680 |
| AGACTCCAGG CCGTTCCCGT AGTCCCCTGC GCCCCCCGGG GCCCCCTCCC CGGCCTCCCC | 1740 |
| ACCGGCCCCG GGCACAAGAT GGCGCCGCCG CCCCGGCCCG GAGCCCCGAC CGCCCGCAGC | 1800 |
| CCCCGCTGCT GCTGCCGCCG CCGCCGCCGC CGCCATCGCC GCTCAGACTG GGGCCCGCCG | 1860 |
| CCCGGCGATT GGAGAGCTGC GCCGGCCACG CCGAGGACTC ATTAGTCAAG CTGCCTGCCC | 1920 |
| GTCACCATGA GCTAGTACTC CATTGGGGAA TATTACTTGG CAATCAAATA AGGCCCCACC | 1980 |
| TCTAAGGCGG GGCACTGCGC CAAATTCTCA AATCCCGGTA GGGGAAATCT GCCTGTCAAT | 2040 |
| CAACACGCGT CCCACCTCCT ATCGAGTCCT TAGGTAATAA TACCGCCACG CTGTGACGAT | 2100 |
| ATTCCTGCTT CTCCCCGGCC TACGGGCGGG CCCGCGAAGT ATGGGACGCT CCGTGATTGG | 2160 |
| CCCTAGCTAG GCGACTGGAA AGGACCAATC TTCCGATCGC CTCACCGCAG TGGCCCAGTC | 2220 |
| TCAGATGCCG ATTGGCTTGC GAGAGTCGAA GGGGTGACAC TCGTTTCGTG ACAGGTGAAC | 2280 |
| CTTGCCCCCG AAAGGACTGC CGGGCTTCAA ACTTGGGAAA CCCGAGGTCA CATGACTAGC | 2340 |
| CAGTCCTAGG GGGCCGCCAT CTTGATACTA CTGCTTGCCA GCTAGTGAGC TGTTGGCCGG | 2400 |
| GTGAGGCCCA AAACAGAGCA GCAGTTTCAG GAAACTTGTA TCTCGACCAG GAAGCACCAG | 2460 |
| TAGATGGGAT GTTGCTGAAA ATGGAGGTTG TGAATGAAGC ATTCCAGGAG GGAGCTTACT | 2520 |
| TTCCCCATCC AGGTTATTGG CACCATCATC CACTAGCTCT CCCGCACCAG AAAGCAGGGA | 2580 |
| GGATTCCTCA GTCCAGAGCT ACTAGTCACA AGTCCTGTCT GTCCCGCCCT CTTGCGTAGG | 2640 |
| CCTTCTGCTC CCCAGTTCCA TTTTCTTTTT CCTGGACAGC TTCCAATGTC ACCCCTCCAA | 2700 |
| TCTGCACCGC TAACAGACTG GCCCCCCTTT GCTGGCGAGG TAAAGTCTCA AAACCGTAAA | 2760 |
| TCACGGCCTT CGATACGCCA GCATGTGGTT ACTTTGTGGA TGTTGTTTCC TTCCACTCTT | 2820 |
| CTCGTTCCTT TGGGTGTACC TGCACCCAGT CTGTGCCTCT AACATGTAGT CCCCCTTCAA | 2880 |
| TCAAACCACT GCAAACCCCA GCTTCCCCTC ATTTCCCAGG ACAAGTGGGC CTATCTCCAC | 2940 |
| GGCGCGCTTA ATTGTTTTAC TGTTTCCTAA CTAGGTTGTG AGCGCCTGCA GATGAGGGGC | 3000 |
| CGGTTCCTAT TTATATTCGC ATCTCCACGG CCTGGCAATA TGCCTACCAC ATAATGTCCT | 3060 |
| GTTAGATGTT TGTTGATTGA ACAGGCATTG ATTGGGGATT TGGGTGCCAC CCTTCATT | 3118. |

[0452] Exemplary gRNA spacer sequences of the disclosure that specifically bind to a target sequence of an RNA molecule encoding a PABPN1 protein of the disclosure may comprise or consist of a nucleic acid having a sequence selected from any one of any one of SEQ ID NO: 6121 to SEQ ID NO: 9213.

[0453] Compositions of the disclosure may comprise a gRNA comprising a spacer sequence that specifically binds to a target sequence of an RNA molecule encoding KCNQ4 protein comprising or consisting of about 20-30 nucleotides of the sequence of:

| (SEQ ID NO: 318) | |
|---|---|
| tcctcttgaa aactttaatg aaaccaataa gttaataagt taacaaagtg aggtacttgc | 60 |
| atatccgaga accgagttga tggcggaacc tcgatcgtgg aaggaaggag ggcttcttcc | 120 |
| catgtctcct tggtcatagg gtaatcccat tctcctggcc ctctccacag ctgtctctga | 180 |
| gtgggtggag gggtggctct ctggggacag tgcagtgcag gtggggtgag ccaggagtgg | 240 |
| ctccatccag ggcatgacgg tcacatgcag agggcatgtt ggggcagagg ctgggcacca | 300 |
| tggactgagt aagatccagt ccaagccctg gtgctggcgc atgcaggtcc ccagcacgag | 360 |
| atgcaggcag cgtggcctcg gccccttgtt cccacagagg gttgccattg gtccactacc | 420 |
| cctcaccttc ctgccacctg cattggcttt gcagaagagg agcaaagggg tggggataag | 480 |
| aaagtgttcc tggagtgaat gggggctgac gcctggatgt ggcgctgcca attgaagtga | 540 |
| agaagtgggg tgtggaggga ggggagacag tgcatgtgaa agccggatgc gcggttggta | 600 |
| tagctattac atgcattctt attctctctg ggagttagag tgactaggaa ggcacaggcc | 660 |
| tggctagaag tgggcctggg gtctctccag tggtgtcagg cctgggcccg agttgtgctg | 720 |
| tggagacacg gaggcgggcc cttggggaca ggcagaggca gtgggttagg gctcctggac | 780 |
| cagagaggag gagatcttct tgaagaaggg gagcgggtaa aggtctgggt ggggcctgga | 840 |
| gagctctcgg gttacttcaa agctccttct cctgctcaga tggagttggg ggtcttcctc | 900 |
| ttagtggtcg tcaccctgca aggccagtcc actggcatct gctgcagagg cccaggagcg | 960 |
| gctgagtggc tctgcactca tgtctccaag tgtgtcacgt cattgcatgt ttaagtgtga | 1020 |
| gaggctttct tcctgtctgg agaaactaaa aggctatgtt tgtgcgatcg tccacgaagc | 1080 |
| actgtctggg agttttgggg aggatacaga aacctgtgct gactatgagt ggtgtctgga | 1140 |
| gggccaagga ggggagtggc cacccagcag gaggagggag cccctgggag ctgacacttg | 1200 |
| caaatgggaa gaaaggccca ggcattgccc ttaggagagg gcaggggaga aacaggcccc | 1260 |
| atgctgggag gggaaggagt gataagccaa agaataggga cagggtggtg gccaagcagc | 1320 |
| ctgagaccag ctactgctgg gggcccagct cccaatgggg gagggacaga gagaccccat | 1380 |
| gggggtcccc aaagttgcat atttaacatg gtttgcatat atggtgtcca cctgccttgt | 1440 |
| ggcagggtcc tgtgctttgt gggtacctgt gggggcacct tggcccaccc ccaagtgggg | 1500 |
| cggggacttg gcgggagggc ttccctgctg tgtccgaagg gtgggccaga gacctcacct | 1560 |
| tgcatagctg gaagctgggt cagggcccag ggccccagcg cccgctccca ctcccggggc | 1620 |
| tgtgcccctg ccaggtgggc cacatagggc cttgatggag tgggcagggc actggggggc | 1680 |
| ccagaggccg cgggacggcc gctgctgctg ccctctgtgc gacctggcat ctcacgctcc | 1740 |
| tgaggtgggg aaggggcgct ggcacccaca gcaggtacca cgcccactca ggcagctcaa | 1800 |
| tactgcgtgt ggtctctctc cccgtgaggg agtgagttca agtacgagag gagtccggag | 1860 |
| gcctcagagg gcagtcggag cgccaggccg cggggctggc cgtgtgctgc cctgcctctg | 1920 |
| agaagtccct cagtccatgt tggtgctgac cgagcgggag atgctgagcg tctgtgcgga | 1980 |
| gacggagatg tcctcgtggt ccacagggct gtggtagtcg gaggtgatgt cggggtcgaa | 2040 |
| cagcggcact tgcacggcgc ccaggctggc cgaggtgcca gagcgcaggc agcgcgaata | 2100 |
| gaagcccaac agcaggtcca gcttgtgctc gatggactgc acctgcttct ccaccttgac | 2160 |
| cacgcgtccc atcatgctga tttcatccac cacctccgcg tcggagggcc ccttgtcgcc | 2220 |
| cttctcccgg gccttcctgt ccccgggccc ccgacccaca atttggtcca cccgagtttg | 2280 |
| caggctcttg atccggccca gcatgtccag gtggcctgct gagtactgct caatgacgtc | 2340 |
| cttcacgtcg tacggtcgca gtgtctcctt gaatttcctt ttggccacca ggaacttgag | 2400 |
| aatcctgatg gagcggatga ctgtcttcac agcaggcatg atgtcgtcca ccgtgagctc | 2460 |
| acactggtag ctcttctcct ctgctacttc ctctgagggg gcatcctcag cagaggtgcg | 2520 |
| gggtttgagt ctcagagatg cccggaagcg ggtgcggtca ttgaagctcc agctcttttg | 2580 |
| caccttggtg gggctggtgg cctcacccac ctgctcgctg cttggggagg tgggcattgt | 2640 |
| tggaggtgcc agatgctgct tggaaggacc cgtccgccgc tgggagctgc ccatgcggat | 2700 |
| gcggtctttg atgcccatcc ggctgctttc cccagggcag aaggaggtgc tgcccggccg | 2760 |
| gtggcaggtg gcaacgggcg ggtaacggga gggtgctccg tcgggtaccg gcgcccgccg | 2820 |
| cacctccagg ggccgtaggc ccccattgcg ggcccgttgc acgtgctcaa acaagagggc | 2880 |
| cagctctctg aaggatggga ggatactgtc atagtagtac caggtggctg tcaggtaggc | 2940 |
| ccggctcata tcggtggagt acaggcgcca ggcagcctgg atgaggttgg ctgccggcat | 3000 |
| cctccgcttc tcgaagtgct tctgccggtg ctgctcctgg accttcaggg caaagccgga | 3060 |
| gcctaggatg ccggcaggca gggcaaagaa agagatgccc agtaaggcga agccagcagc | 3120 |
| caggaccctg cccagccatg tgtgcggtgt cttgtcacca tagccgatgg ttgtcaatgt | 3180 |
| aatcgtcccc caccagagcg agtcggcgta ggaggagaag tcggagttgg cgtccttctc | 3240 |
| agccaggtag accaggaagg aggcgaagat gagcaccagg aacccgatgt accaggcggt | 3300 |
| gatcagctcc ttgctatgcg cgtagaccac tgagcccagc agcttccagg tgccgccgcg | 3360 |
| gcggtccatg cgcaccatgc gcaggatctg caggaagcgc atgctgcgca gcgcggacgt | 3420 |
| ggcgaagatg ttgccctggg tacccgcggc gatgacggcc accgaggcca cgaacacgat | 3480 |
| gaagtcgatg acacagaagg gctttctggc aaagcggaag cgaccctgcc atcctcggta | 3540 |
| gcggcagcag catccggcgg accagacccg gacgatgtac tccaagccga aaaccacgat | 3600 |
| catcacgaat tccaagatga ggagacactc gttggcaagt tcctggtgct cctggatagt | 3660 |
| ggacagcaca gacagcacca ggcagctgaa gaccagcaaa aatatgaaga cgtggtagac | 3720 |
| gaaggcccag ccgcggggcc gctccagcac gttgtagacc cagttctgca ggcggcggta | 3780 |
| gcgcttgtgc gcggccgagg agcgctggcc gcaggcggag cccgagccgg agcccggccc | 3840 |
| agggaggggc gcgcccggcg gcagggggct gcccaggagg ccgaggcggc gcggggagcc | 3900 |
| gcccccgccc gcctcgccct gttcgctctg cacggccgtg agcgccacta gctccgcgcg | 3960 |
| gggggcgtcc ccgggcgggg gacccaggcc gaggcggcgc gggggggcct cggccatggg | 4020 |
| cggcgccggg ctgggggcgc cggggcccgg gcacggtccg gggcgggggc gcgctcgggg | 4080 |
| cgctcagaga cgcatggctc ggacccgggg ccagaggggc gacccggggc gggcgcgggc | 4140 |
| ggcgggggct aggggccggg ccggggccgc gggcgggcgc tcggagcctg ggggccgccg | 4200 |
| gagcccgcac tgacctcccg cttccccggc gactggggct gctctttccg actccaactc | 4260 |
| tcttattacg cgctccatgc cgctcgcctt tccacctgcc accggcgcgc gccgctcaca | 4320 |
| tgtc | 4324 |
| | 4324. |

[0454] Exemplary gRNA spacer sequences of the disclosure that specifically bind to a target sequence of an RNA molecule encoding a KCNQ4 protein of the disclosure may comprise or consist of a nucleic acid having a sequence selected from any one of any one of SEQ ID NO: 9214 to SEQ ID NO: 13512.

[0455] Compositions of the disclosure may comprise a gRNA comprising a spacer sequence that specifically binds to a target sequence of an RNA molecule encoding CLRN1 protein comprising or consisting of about 20-30 nucleotides of the sequence of:

| (SEQ ID NO: 319) | |
|---|---|
| agcatctgga aactcggtgt gttctgatgt ctgctggcga atagcgaatt gacaccagag | 60 |
| caagttattt ctcaggtata cggttgtttc atccttgtaa atagttccaa agggaaacag | 120 |
| tgttttattt taaggagtac tttcaaacct attatatgag ggctgctgag tactcagcac | 180 |
| ctgtggtcag aggcctagtg atctgtttgc tgtcattctc tgctttttcc ttggtgcttt | 240 |
| ctggaggaca gcaggttgag gatgaaggaa gggtcagttc caggctcagc tgtggccttt | 300 |
| agtcagctgc agatcaattt gatgggtaat tcaggggaaa aaaaaagttg acctgggtca | 360 |
| tgcttggtga cagccagaac aagaccaaga tgatacagtg ataccgtcat aatcccagat | 420 |
| ttaatataat tttcataatt gcatattagt actcgagaca ctatagctag aaaaacagcc | 480 |
| cctaataagt cattttgcat caaatgtact aagcagagat catttttcat gattcctcag | 540 |
| tggtcctaac aattatgttc attgaaagta ctgtcgtgaa tgtaattggg actcaggcac | 600 |
| gggaggaaaa ataccctaag cttggttttt tcttcttttc ttcttttaga gtttgcagat | 660 |
| tttgaccaac agacatggtt aataagacta tgctttttta aagcctatat tttatattta | 720 |
| ttttattttt taattttgtt agtgacaggg tctcacttta ttgcccaggc tgtaactcga | 780 |
| actcctgaac tcaaatgatc ttcccacctt ggcctcctga agtgctggaa ttacaggtgt | 840 |
| gagtcaccac gcctggccta agagtatact ttaaacaaat tttttaaaat gtgtgttgat | 900 |
| acattttata gatgttcatt taatacacta ctgttttagg aaagcgattg cagctcagtt | 960 |
| ttctgaaatc tggcaacaaa tgtgtggata tattagagat attatttgtt tttattaaaa | 1020 |
| tatattccat gtgcctttga tatctttttg ataggaagac atcttacaca cacacacaca | 1080 |
| cacacacaca cacatatata tatatggagt aacaatttgt cgattctagt caactgcctt | 1140 |
| tgactacctg ggtcaagcaa tttcccacca gataaaacaa cttttcaaag ccttccttct | 1200 |
| gcttccctta ctttccagcc tgtatcctta gtacgtaatt tgtaaacatt gtcacgaagg | 1260 |
| gtcctgatgc tttaatatat gcagactaaa aggatatgca aaattaacca catctaaaag | 1320 |
| tgaccaaagc aagtctactc ccttgtaaaa ttatagaaag gtttgccttt cagtacatta | 1380 |
| gatctgcagc tacattagtt gtttctgcgt ctttagattt tgcaaaaggg aactgaaatc | 1440 |
| cagcaagtcg tattaggagc ccattcagaa aatgaacaaa aaagcaaaag aaaatgaccc | 1500 |
| agaatgaggt ggtatatttt tcactttgcg ttttgtagac ataagtccct tctttataat | 1560 |
| ttgcaatttt ttctgagagg tgatggattt tcacttcaga ggcaaacaat atcatgacaa | 1620 |
| gacagccaca ggagcctgaa atgaagctca aaaggtacag ccctagggga ccatgcagag | 1680 |
| tttcaaaagg ttttccaaaa gcattgtaca tgaagaaggc tgtccccacc atggttaaca | 1740 |
| caataaggat ggcagagaag agaatgacat tgacgtggat gctcactggg attgctttga | 1800 |
| gcaaatctgg aaaaaatgag aaccgaaagg gccttgctcc caacccacac tgcctcacac | 1860 |
| cctctccgtg gaaaagcccg tactgcattt cacccataaa cttgtccagc tcctgccctg | 1920 |
| aggcattgac gagcagagct cccgttttgc agaggacagt ggctttgatc cacaacggtg | 1980 |
| tccccaaggc tgtcacaact ccgagggcac atgcaaaact gaacactccg gccatgcaaa | 2040 |
| aaatgatttt cttctgttgg cttggcatga tgagaaacgg cttctgt | 2087. |

[0456] Exemplary gRNA spacer sequences of the disclosure that specifically bind to a target sequence of an RNA molecule encoding a CLRN1 protein of the disclosure may comprise or consist of a nucleic acid having a sequence selected from any one of any one of SEQ ID NO: 13513 to SEQ ID NO: 15574.

[0457] Compositions of the disclosure may comprise a gRNA comprising a spacer sequence that specifically binds to a target sequence of an RNA molecule encoding APOE2 protein comprising or consisting of about 20-30 nucleotides of the sequence of:

| SEQ ID NO: 320) | |
|---|---|
| tgcgtgaaac ttggtgaatc tttattaaac tagggtccac cccaggagga cggctggggc | 60 |
| ggggacaggg tctcccgctg caggctgcgc ggaggcagga ggcacggggt ggcgtggggt | 120 |
| cgcatggctg caggcttcgg cgttcagtga ttgtcgctgg gcacaggggc ggcgctggtg | 180 |
| cccacggcag cctgcacctt ctccaccagc ccggcccact ggcgctgcat gtcttccacc | 240 |
| aggggctcga accagctctt gaggcgggcc tggaaggcct cggcctgcag gcgtatctgc | 300 |
| tgggcctgct cctccagctt ggcgcgcacc tccgccacct gctccttcac ctcgtccagg | 360 |
| cggtcgcggg tccggctgcc catctcctcc atccgcgcgc gcagccgctc gccccaggcc | 420 |
| tgggcccgct cctgtagcgg ctggccggcc agggagccca cagtggcggc ccgcacgcgg | 480 |
| ccctgttcca ccaggggccc caggcgctcg cggatggcgc tgaggccgcg ctcggcgccc | 540 |
| tcgcgggccc cggcctggta cactgccagg cgcttctgca ggtcatcggc atcgcggagg | 600 |
| agccgcttac gcagcttgcg caggtgggag gcgaggcgca cccgcagctc ctcggtgctc | 660 |
| tggccgagca tggcctgcac ctcgccgcgg tactgcacca ggcggccgca cacgtcctcc | 720 |
| atgtccgcgc ccagccgggc ctgcgccgcc tgcagctcct tggacagccg tgcccgcgtc | 780 |
| tcctccgcca ccggggtcag ttgttcctcc agttccgatt tgtaggcctt caactccttc | 840 |
| atggtctcgt ccatcagcgc cctcagttcc tgggtgacct gggagctgag cagctcctcc | 900 |
| tgcacctgct cagacagtgt ctgcacccag cgcaggtaat cccaaaagcg acccagtgcc | 960 |
| agttcccagc gctggccgct ctgccactcg gtctgctggc gcagctcggg ctccggctct | 1020 |
| gtctccaccg cttgctccac cttggcctgg catcctgcca ggaatgtgac cagcaacgca | 1080 |
| gcccacagaa ccttcatctt cctgcctgtg attggccagt ctggaggcca ggggttccca | 1140 |
| gggtcccagc tctttctaga ggcccctgag ctcatccccg tgcccccgac tgcgcttctc | 1200 |
| accggctcct ggggaaggac gtccttcacc tccgctgggg ctgagtag | 1248. |

[0458] Exemplary gRNA spacer sequences of the disclosure that specifically bind to a target sequence of an RNA molecule encoding a APOE2 protein of the disclosure may comprise or consist of a nucleic acid having a sequence selected from any one of any one of SEQ ID NO: 15575 to SEQ ID NO: 16797.

[0459] Compositions of the disclosure may comprise a gRNA comprising a spacer sequence that specifically binds to a target sequence of an RNA molecule encoding TNNI3 protein comprising or consisting of about 20-30 nucleotides of the sequence of:

| (SEQ ID NO: 321) | |
|---|---|
| tttcagctca gagagaagct ttattcctca gggccctcct cagggcaggg gcagtaggca | 60 |
| ggaaggctca gctctcaaac tttttcttgc ggccctccat tccactcagt gcatcgatgt | 120 |
| tcttgcgcca gtctcccacc tcccggtttt ccttctcggt gtcctccttc ttcacctgct | 180 |
| tgaggtgggc ccgcaggtcc agggactcct tagcccgggc ccccagcagc gcctgcatca | 240 |
| tggcatctgc agagatcctc actctccgca gggtgggccg cttaaacttg cctcgaaggt | 300 |
| caaagatctt ctgagtcaga tctgcaatct ccgtgatgtt cttggtgact tttgcctcta | 360 |
| tgtcgtatct ctcttcatcc accttgtcca cacgggcgtg gagctgtcgg cacaagtcct | 420 |
| gcagctccgc gaagcccagc ccggccaact ccagcggctg gcagcgggtg ctcagagcgc | 480 |
| gccccttctc tccgcgccgc tcctccgcct ctcgctccag ctcttgcttt gcaatctgca | 540 |
| gcagcagagt cttcagctgc aattttctcg aggcggagat cttagatttt ttcttggcgt | 600 |
| gcggctccgt ggcataagcg cggtagttgg aggagcggcg tctgattggg gctggtgcag | 660 |
| ggcgaggttc cctagccgca tcgctgctcc catccgccat gctgagactc aggccgggaa | 720 |
| tggcaggagg cagggcgagg acaggggcgt ttggagggtc agtgaggggg ccgcccgggt | 780 |
| gaccttcagg gtcccaggga ccgtcagtct cctccgggct gcttgagact ccccgaggac | 840 |
| act | 843. |

[0460] Exemplary gRNA spacer sequences of the disclosure that specifically bind to a target sequence of an RNA molecule encoding a TNNI3 protein of the disclosure may comprise or consist of a nucleic acid having a sequence selected from any one of any one of SEQ ID NO: 16798 to SEQ ID NO: 17615.

[0461] Compositions of the disclosure may comprise a gRNA comprising a spacer sequence that specifically binds to a target sequence of an RNA molecule encoding BEST1 protein comprising or consisting of about 20-30 nucleotides of the sequence of:

| (SEQ ID NO: 322) | |
|---|---|
| aacgagtatt tgtatttatt aaactcatta gtttgggcag tatactaagg tgtggctgtc | 60 |
| ttggattcag atagaactaa gggttcccga ctctgaatcc agagtctgag ttaaatgttt | 120 |
| ccaatggttc agtctagctt tcacagtttt tatgaataaa aggcattaaa ggctgaagta | 180 |
| gtctgggatt tttatctatt aagctaacca tttgattcag gctgttgtag gacatgttct | 240 |
| tcagtgtgga cagctgtatg gctgtgactg gatcagtgtc ctgctggtgt acacacaggt | 300 |
| gaggacctgg ctggcgaagc atccccatta ggaagcaggt taggaatgtg cttcatccct | 360 |
| gttttccaag gcccaataag gatccatgtg atctttgagt gtagtgtgta tgttggttgg | 420 |
| tgattgttcc aaaggttctt tgaggtgatt ttcggggatc tctggcatat ccgtcaggtt | 480 |
| aaactccaca gttttcctcc tcacttgaga tacttctggg tgctccatca aggccccatc | 540 |
| gctctctgag agcaattcaa aacttttctt ggccccagaa ctcacagtct ttaagctttt | 600 |
| gtctttggtg tctatgcctg tgacactgtg aagctttgac ggcgctgatg gttctagggg | 660 |
| gaagaacatg ggagtggggc tgaggggcgt ctgtggggca ctgtagtagc ctggcctctg | 720 |
| atacagtggg gcagacttga aggcgtccac agccttaagc ttccaggcct tgttgtcttc | 780 |
| ctggccccta acgttctgtt tggctgcctt gtggtttttg ggcaggccct cgtggagaag | 840 |
| ggattccctc ttgggccaca gtagtttggt ccttgagttt gccctgggag gatggtgatc | 900 |
| atgggactgc aggcctagga agcggccaat gatgccagcg tgagcatcct cctcgtcctc | 960 |
| ctgattgggc tggaactcca tctcctcttt gttcaggctg atgttgaagg tggagcccat | 1020 |
| aaaggaggct cgacggaact gggcggaagc agctgtgtag gggggctgtg gctcgggctt | 1080 |
| attccagtac atgtccggct ccatccgagg caggtcctgg tgcatctcat ccacagccaa | 1140 |
| cagggacacc tgcaaattcc tgtcgacaat ccagttggtc tcaaaatcat catcatcctc | 1200 |
| tccaaagggg ttgatgagct gctctgccac cttcagccag ccaacataga agaagaactg | 1260 |
| caggaacgtg aagacgggca caacgaggtc cagctcatgg ccagggtagg ccttggctgg | 1320 |
| gttcagaaac tgccgcccaa ctagacaagt caggaagaag ctgtacaccg ccacagtcac | 1380 |
| cacctgtgta tacaccagtg ggatactaat ccagtcgtag gcatacaggt gtccacactg | 1440 |
| agtacgcaag gtgttcatct cgttcagcag gctctggagc aggatagggt cccggattcg | 1500 |
| acctccaagc cacgccttca ttgacaggtt ggcaaaccac acccagggca cccagaacat | 1560 |
| gttgtgtggt aggctcagtt tctccaactg cttgtgttct gccggagtca taaagcctgc | 1620 |
| ttgcaccagg tgctgggcgc tggggaagcg cttgtagact gcggtgctga cgctgcgcag | 1680 |
| gatgagcacg ttgcccaggt tggcgtagcg gatgagcgtg cgccgcagca gccggccttg | 1740 |
| ctcgtccttg ccttcgacga agcccgacac caggctcatg aggcggtcgg gccacggcag | 1800 |
| gttctcgtac tggttccacc agcgggtcac gaccagcgtc acgtagaagc ccagcacgaa | 1860 |
| ggaaatgggg atgagctgga tgtagctgtc gcaatacaga gtcagtttct caaacatcag | 1920 |
| ctgttgttct tccgtgaggg ccagcctata aataaagcgg atgatgtagt agcagagcag | 1980 |
| gaagattaag aactcgccat atagcagctt gtagatgctg ccccgccagc acagcagcag | 2040 |
| gcgggagaag gagcctaagc gggcattagc cacttggctt gtgtaagtga tggtcatggc | 2100 |
| caggcagtgg gctgcagcag gtgggcttgg gtcaggtggg gttccaggtg ggtccgatga | 2160 |
| tcccacagaa ggtctggcga ctaggctggt gggactccct gggactctgt | 2210. |

[0462] Exemplary gRNA spacer sequences of the disclosure that specifically bind to a target sequence of an RNA molecule encoding a BEST1 protein of the disclosure may comprise or consist of a nucleic acid having a sequence selected from any one of any one of SEQ ID NO: 17616 to SEQ ID NO: 19800.

[0463] Compositions of the disclosure may comprise a gRNA comprising a spacer sequence that specifically binds to a target sequence of an RNA molecule encoding MYBPC3 protein comprising or consisting of about 20-30 nucleotides of the sequence of:

| (SEQ ID NO: 323) | |
|---|---|
| tgagttctct gtgactgcac ttatctttta ttgcccaata aacattggga agacatagca | 60 |
| ggccagaaag gcctgtcccc agacattgtt tcttgaggcc accctccttt taccccaaag | 120 |
| atccaggggc ttccttcagg agccctgtgg accagtctgt gcaacaccca ctcaggactg | 180 |
| cccgacaact gccctgctga tcccccatcg cagcacagga gacacacttg tcacacatac | 240 |
| atccaacagt agggaggggt ttccccaact tccctccagg ctcctggcac ggggctggca | 300 |
| tccggttgta cctggccatc cccaggagcc agcctggtca ctgaggcact cgcacctcca | 360 |
| ggcggcactc acaccgtgcc tcgccctgta agttggtggc cctgcagaca tagatgcccc | 420 |
| cgtcaaaggg gcagggcttt ctaatctcca gagtcaacac tccctgcttg ctgaacatgc | 480 |
| ggaagcgggc gtcttctccc aggtccaggc cattcttgaa ccaggaaatc ttgggcttgg | 540 |
| ggctaccccg gacagcacag cagagcatag cagtgtagcc cgcgatgacc gagcggttca | 600 |
| ccaggggctg ggtgaagctt ggggcctcgg agaagtccag ggccttatag ttgggtggct | 660 |
| cataggtgat gcctggtctg gggataaaga cgggctcctt ggtggtggcc gctctgtcac | 720 |
| taaagccaac catattctgg ctgaagacgc ggaagtagta gccattgcca atgatgagct | 780 |
| ctggcaccac gcagtgggtg cggcggtaat gctccaagac ggtgaaccac tccatggtct | 840 |
| tcttgtcggc tttctgcact gtgtaccccc agagctccgt gttgccgaca tcctggggtg | 900 |
| gcttccactc cagagccaca ttaagacccc aggcgtcagt cacccggaga tcctggggag | 960 |
| gacttggctt gtcaacaacc tgcagcacca gcgtggcctt gtcctccatg ttctcaatgc | 1020 |
| gcaccgtcac ctggtaagtg cctgaatgca cgcggcgagc ggcccggatg aacaggatgg | 1080 |
| tgtctgtggg gctgttgcgg atgctcacct cctcgcctgc caggggctgc ccctctttgg | 1140 |
| tccaggtcac ctgaggccgg ggcttgccct ggaaagggat gagaaggttc acaggctccc | 1200 |
| cgaccttctt ctgaatggtc tggcgcaggt gcctgggcag ctgaagccgt ggccgttgca | 1260 |
| ggatctcctg cactgtcacc ggctccgtgg tggtaacagg ggctccaggc cctgccatat | 1320 |
| tgtgtgcccg cactcggaaa agcagccggg cccccgtggg caggtccttc accagtatcg | 1380 |
| atgtgtgctc tgtcagcccc tgcagggcag ccacccactc tgagcagccc tctgggcagt | 1440 |
| actccacgct gtagccatcc aggcctcctg ctcccacgcg ctctgggggc cgccacttga | 1500 |
| gggagaccgt ggtgtcagag acgtcctcta ctgccaggtg ggtgggttcg ctggggggac | 1560 |
| cgataggcat gaagggctgg gaggcagggc tgggcctgga catgccgatg gcgttgaccg | 1620 |
| cgtagacgcg catctcgtac accacgccct cgatcatgcg ccgcgcttca tgactcagct | 1680 |
| cctgaatcag gtcgaagttc agccgcatcc accggtagct cttcttcttc ttgcgctcca | 1740 |
| ggatgtagcc caggatgggc tgcccgccat cgtaggcagg cggctcccac tgtactgtgc | 1800 |
| aggagtcctc tcccacgttg ctgatcttgg gggccgcagg tgcgtctggc acgtcgatga | 1860 |
| ccttgactgt gaggttgacc tggtcctcgc ccacagggtt cttcactgtg accgtgtaga | 1920 |
| cgccctcatc ttccttctct gccccctcga ccgtgaagat gctgcggtcc ttggtggtct | 1980 |
| ccacgcggac ccggccctcg gtctcacaca gcagcttctt gtcaaacacc cactcatcgc | 2040 |
| tgtcacctgt gtcctctggg gcatctgggg ctggcctggc tggggcctta ttcccctgcg | 2100 |
| tgatagcctt ctgccagatc acagtgggag cagggtcccc agagataggg acgtccagac | 2160 |
| gtagcttatt tccagctaca accacaatgg tgtctggtat gcggcctggg cagtccaggt | 2220 |
| ggatcttggg aggttcctgc ctgggtacga agtcaatctt gacctccatg aagtggagct | 2280 |
| tggctgacag gttgcaggcg aagccctcgg gcacaaagct gtagtcagcc tcgtcggcag | 2340 |
| gtgtgacgtc gtcaatggtc agtttgtgga cccgcccgat gtgggacacc tttatgcggc | 2400 |
| tgtcgggcac cagctccttc ccattcttca gccacacacc ccgaacattc tcatctgaga | 2460 |
| cctcacattt gaacaccgcc tggtcctttg cgcccaccat caggtctgcg atgctctggt | 2520 |
| acacctccag cttcttttcc tgcacaatga gctcagccag cgcctggccc ccgctagtgc | 2580 |
| acagtgcata gtgccccgcg tcctccagca tggcctcgtt gatgatcagg tggtgtctct | 2640 |
| gcccgtcctt cttgaaccgg tatttgaagg tctcctcccg ggtcagctcc accccgtcct | 2700 |
| tcagccattt gacttgcgcc ccctcctccg atacttcaca ctcaaactcc acccgctgcc | 2760 |
| ccaccatcac cagctggtcc tccaaggggc gcgtgatgag cacagggggc tctttcacaa | 2820 |
| agagctccgt gctacacttc tcgccaccca ccacgcactg gtaggctgcg tcgtccgcca | 2880 |
| atgagcactg gctgatggtc agggtacgct tggcaccgat ggactcaaag atgtacttgc | 2940 |
| tgccgctcat ctggatctcc tggccattct tgagccattt gacctcagcg tcatggtcag | 3000 |
| ccagttccac ggtcagccgg atcttgtggc ctttgctcac ctggtaggcc ggctccagct | 3060 |
| tcttctgaaa ggctgtgctc ttcttctcat cgcgcctcat gcccttgagc ctctttagca | 3120 |
| tgccgcgcag gtcagtgacg ccgtactgga aggcgatgcg ctcgtactca gatgggggtg | 3180 |
| cctgccgtag gatctcccac acgtcctcct ctgctggtgc ctccagcttc gagtccctcg | 3240 |
| gggtccggaa actgtctctc tttttcagca gtgagctgaa gtccagaatc ccagtgtcct | 3300 |
| catggctatc actgatccgc cgaccacctc cagccaggct cgtgcggcgg aaggctgata | 3360 |
| ggaggtccag gtctccggtg cccatggcct cgtggacagt gagattgaag ttggagcagt | 3420 |
| caaatttgtc cttggtggac acctcacagc ggtagctgcc agtgaaggca ggctgggcat | 3480 |
| cggtgatgtg cagctcgaac agatagacct tgctggcgcg gtcgtagctg tcgtgcagct | 3540 |
| gcaggtgctg gcccaccttg ctgctcaggt ccacccattt gcccttgaac cacttgacca | 3600 |
| caggcggctt caggaggctg gcgccggcca cgcgggctga gaaggtgatg ctgccaccca | 3660 |
| cggtcacctc gccatcctgt ggccgcatca cgaagaggcc aatggggtca tcgggggctc | 3720 |
| caggggtagg accattgaga gctgctgagc ttgacccttt gggacttggg gcactttctc | 3780 |
| ccagctcagc ggctggggcc ggggcttctc caggggctcc agtggcctca gcaggggcag | 3840 |
| gggcaggggc cagcatgggc tctgccttct ctgcctctat gaccttgagg tcgaacttga | 3900 |
| ccttggagga gccagcaatg actgcgtaag atccctggtc ggcagggccc acttcccgca | 3960 |
| ctgtcagcgt atgccgtgtg ccctctgtgg ccaggccgta cttgttgctg gcgctgatgt | 4020 |
| cactgcctcc gcgctgccag cgcaccttca ctcctgcccg ctctgtctcg gcctcgaaca | 4080 |
| cggcagggct gcctgcggcc acttccactg accgtggctt cttgctaaaa gctgagactg | 4140 |
| gcttcttccc cggctcaggc atcctgagag acgtcacacc aggcacgaag caggcacagg | 4200 |
| tcacccaaag agggact | 4217. |

[0464] Exemplary gRNA spacer sequences of the disclosure that specifically bind to a target sequence of an RNA molecule encoding a MYBPC3 protein of the disclosure may comprise or consist of a nucleic acid having a sequence selected from any one of any one of SEQ ID NO: 19801 to SEQ ID NO: 23992.

[0465] Compositions of the disclosure may comprise a gRNA comprising a spacer sequence that specifically binds to a target sequence of an RNA molecule encoding TNNT2 protein comprising or consisting of about 20-30 nucleotides of the sequence of:

| SEQ ID NO: 324) | |
|---|---|
| tcagtgtgtg gtggcttttt attactggtg tggagtgggt gtgggggcag gcaggagtgg | 60 |
| tggctcccac ctaggccagc tccccatttc caaacaggag ctgcctgggg tgcccaggag | 120 |
| ggcccgggaa ctgggggagt gcaggccgga ggcaggtgcg agcgaggagc agatctttgg | 180 |
| tgaaggaggc caggctctat ttccagcgcc cggtgacttt agccttcccg cgggtcttgg | 240 |
| agactttctg gttatcgttg atcctgtttc ggagaacatt gatctcatat ttctgctgct | 300 |
| tgaacttctc ctgcaggtcg aacttctctg cctccaagtt atagatgctc tgccacagct | 360 |
| ccttggcctt ctccctcagc tgatcttcat tcaggtggtc aatggccagc accttcctcc | 420 |
| tctcagccag aatcttcttc ttcttttccc gctcagtctg cctcttccca cttttccgct | 480 |
| ctgtctgggc ctgcttctgg atgtaacccc caaaatgcat catgttggac aaagccttct | 540 |
| tcttccgggc ctcatcctca gccttcctcc tgttctcctc ctcctctcgt cgagccctct | 600 |
| cttcagccag gcggttctgc cgctccttct cccgctcatt ccggatgcgc tgctgctcgg | 660 |
| cccgctctgc ccgacgtctc tcgatcctgt ctttgagaga aacgagctcc tcctcctctt | 720 |
| tcttcctgtt ctcaaagtga gcctcgatca gcgcctgcaa ctcattcagg tccttctcca | 780 |
| tgcgcttccg gtggatgtca tcaaagtcca ctctctctcc atcggggatc ttgggaggca | 840 |
| ccaagttggg catgaacgac ctgggctttg gtttggactc ctccattggg ccatcttcag | 900 |
| cctcctttgc ttcctcttct tcttcatctt cttctgccct ggtctcctcg gtctcagcct | 960 |
| ctgcttcagc atcctcttcc gctgcctcct cctgctcgtc ttcgtcctct ctccagtcct | 1020 |
| cctcttcttc aacagctgct tcttcctgct cctcctcctc gtactcttcc accacctctt | 1080 |
| ctatgtcaga catggtctct gctctccctc caaaaggaga aaaaagtcag tgcaggtaca | 1140 |
| aagggaagcc tgccttcctc agaagagctc tggcccccgt tgtacagaga tcagcgaggc | 1200 |
| ctagggtgaa tctagttcca cccctcatga gctgtgtgac ctcagaacag cagctgccga | 1260 |
| cagatcctgg aggcgtctgc tcagtctcag cggggactgg gtgaggcaga ggatggagag | 1320 |
| ggctttaagc aggcatgtgg gctggggcct ggtgagccag cc | 1362. |

[0466] Exemplary gRNA spacer sequences of the disclosure that specifically bind to a target sequence of an RNA molecule encoding a TNNT2 protein of the disclosure may comprise or consist of a nucleic acid having a sequence selected from any one of any one of SEQ ID NO: 23993 to SEQ ID NO: 25329.

[0467] Compositions of the disclosure may comprise a gRNA comprising a spacer sequence that specifically binds to a target sequence of an RNA molecule encoding pre-mRNA processing factor 31 (PRPF31) protein comprising or consisting of about 20-30 nucleotides of the sequence of:

| (SEQ ID NO: 491) | |
|---|---|
| tcttgacaat gtccttttaa ttgtactctt ttcaaaaaat ctcctttctc agttaaaaaa | 60 |
| gacaaggcat gatgaagacc tgctctagcc catactgggc ggtgatctcg gtcctggggg | 120 |
| aggccaggcc ggactcttcc aaggcctcct ccctgggcag tcccagcaat ggggccagtg | 180 |
| gcagggcagg ttctccctgc cagaacccga tcctagccct tcagaaggac tggacctctg | 240 |
| tgtcccttca gtgggaagcc accttggaca cacgcagtca ttcaggtgga cataaggcca | 300 |
| ctcttctcgc ccttgacctt gaggaactca gccatgctgg agaaatactt ctggttggcc | 360 |
| tcagccacct tcttctctgc cgcctgtggg ttcacaatct ccaggccctg gagtggggtg | 420 |
| aaggccacgc tggaggccgt gcccgaggag cggtcgcgga tggtggactt cccgccatat | 480 |
| acgacgctct gcttctgcag ggtccgctgc agcgtcttgg agatcctggc cttggtggcc | 540 |
| tcgtttacct gtgtctgccg cacacgccca ctgcccgact tgcccaggtg gcccaggctg | 600 |
| aatcccaggt cctcctggta ggcgtcctcc tcgatctctc cgaagctcat acggttggcc | 660 |
| tgcttccgga tctccgtcag ccccagccgc tccttcatct tgcggtacct gcggccgcct | 720 |
| cgcttcttcc gctgtccatc caggggcgca ggcagcggct tcacctgctt cacaggcggc | 780 |
| ggctcctgcc acttgtcgaa tttgcgctcg atctcatcct tcagttcgta gcccaccttc | 840 |
| ccttctgtgc tctcgtggaa actgtccaca cgggctgcca gtgtgcactt ggcggccacc | 900 |
| agccgggccg ctttccgccg cagatccggt ggcagggact gcacgatgtc actgtggtag | 960 |
| atgtagccgg tgtggggcag cactgaggta gacgagaagc ccgacagcgt cttgcgctgg | 1020 |
| gccccgagca gcatgatgtt gcaggcgggc atcttggaga ggttggtcag gccgccggcc | 1080 |
| acacccatga tcttggcggc cgtggatgcc ccgataatga tggacaggtt gggtgcgatg | 1140 |
| aaggacatcc gggactccac atactcgtag atgcggtgct tggaggcgtt cagctccagc | 1200 |
| gccatgtcgc aggcctcctc cagccgctcc agctcctcct ccgacagctg ctgcccctgg | 1260 |
| gtggtggagg cggtgacgct gacgaccatg atggtggcat tggtgaggat ctgctgcagg | 1320 |
| ttctcattgt tcttgcactt gtccaggctg ttgcccagct ccttgaccgt gcggatgtaa | 1380 |
| tccagtgcat tggggaccaa ggactccagt tcagggaatc tctttgagta cttatcccgg | 1440 |
| atgaacttat ggatgatgtt cagctcgttt tcgatctcca cggtcaggtt gttggcatcc | 1500 |
| acgatgacgc ggtattcagg cgcggcctcc actggtccca tcacttctga agctttggct | 1560 |
| tgcttgctga tatactcctc aatcttcatc ataatctcag caaacatctt actatcccat | 1620 |
| agcttggcga tggtcttgac tgaatccccg gaaagatcca gctgtgtctc ctcctgcaca | 1680 |
| tcctcgatcg ctggctcctc ttcttcctcc ccatagcttc ctccttcctc ctcttctgct | 1740 |
| gcctcttcga gatcagctaa gagctcatct gccagagaca tcccgaggcc tctcctctcc | 1800 |
| gcgcaccact gtttctagcg ttagtcgctc acc | 1833. |

[0468] Exemplary gRNA spacer sequences of the disclosure that specifically bind to a target sequence of an RNA molecule encoding a PRPF31 protein of the disclosure may comprise or consist of a nucleic acid having a sequence selected from any one of any one of SEQ ID NO: 25330 to SEQ ID NO: 27137.

[0469] Compositions of the disclosure may comprise a gRNA comprising a spacer sequence that specifically binds to a target sequence of an RNA molecule encoding Progranulin (GRN) protein comprising or consisting of about 20-30 nucleotides of the sequence of:

| (SEQ ID NO: 492) | |
|---|---|
| ttaagaaagt gtacaaactt tattgaaacg cacacgcgca cacacacaaa cacccctgtg | 60 |
| gatagggaaa agcacctggc cacagggtcc actgaaacgg ggaggggatg gcagcttgta | 120 |
| atgtggcttt tgccacaacc cccttctgac agggaaggcc ttagattgag gccccacctc | 180 |
| ccatggtgat ggggagctca gaatggggtc cagggagaat ttggttaggg ggaggtgcta | 240 |
| gggaggcctg agcagagggc accctccgag tggggtcccg agggctgcag agtcttcagt | 300 |
| actgtccctc acagcagctg tctcaaggct gggtccctca aaggggcgtc ccagcgcggg | 360 |
| gcctccctgc gcaaacactt ggtacccctg gctgcgcagc ggaagccagc aggacagcag | 420 |
| tggcgccgat cagcacaaca gacgccctgg cggtagggac agcaggccca gccctgtcgg | 480 |
| ttgtctcggc agcaggtctg gttatcatgg cagaagtgtc cttccccaca ctccacgtcc | 540 |
| ttcacaccca cgtgagggct acgggccagg aaggtggcag gctgggcaga gaccacttcc | 600 |
| ttctcgcagg atcgagcctt cacgttgcag gtgtagccag ccgggcagca gtgctggcga | 660 |
| tcctcgcagc acacagcatg gggcaactgg cagcaggccc agctcccacc caggctcggg | 720 |
| cagcaggtct gccccaccgg gcagctggtg tgctggtcac agccgatgtc tctggggtgg | 780 |
| gataaggaag cccggcgggc aggcatcttc tccagtccag ccacgatctc gcttcctcgc | 840 |
| tgacactgcc cctcagctac acacgtgtag ccctgggggc agcagtgctg gtggtccgag | 900 |
| cagcagacag cctctgggat tggacagcag ccccactccc cagacgtgag ttggcagcag | 960 |
| gtatcggagg agggacagct gctgacatta tcacagggga catctctctt caaggcttgt | 1020 |
| gggtctggca ggctgaggtg agctggggcc ttctccatcc agggcacctg gtggggcccc | 1080 |
| tgttcacagg tacccttctg cgtgtcacac gtaaaccccg cgggacagca gtgtatgtgg | 1140 |
| tcctcacagc acacagcctg ggtaaaaggg cagcagcccc aggcccccga ctgtagacgg | 1200 |
| cagcaggtat agccatctgg gcagctcacc tccatgtcac atttcacatc ccccactgtg | 1260 |
| tgcgcaggca gcttagtgag gaggtccgtg gtagcgttct ccttggagag gcacttactc | 1320 |
| tggatcaggt cacacacagt gtcttggggg cagcagtgca ggtgatcgga gcagcaggtg | 1380 |
| gcgttgggca ttgggcagca gccatacttc ccactgggca gctcacagca ggtagaacca | 1440 |
| tcagggcacc gggaccgtgc gtccggacac atgaccgagc tggacaaggc cactgccctg | 1500 |
| ttagtcctct gggcagggag cttctttgcc agggggtggg tgcccgtggg tgtgatgcag | 1560 |
| cgggtgtgaa ccaggtcgca gaaggcaccg tgcggacagc agtgcaccct gtcttcacag | 1620 |
| caggaagcct ggggcatggg gcagcacccc caggagccat cgaccataac acagcacgtg | 1680 |
| gagaagtccg ggcattcgaa ctgactatca gggcactgga tggcacccac ggagttgtta | 1740 |
| cctgatcttt ggaagcagga tcgcccgtct gcactgcagt ggaagccccg tgggcagcag | 1800 |
| tgatggccat ccccgcatgc cacggcctct gggaaggggc agcaactgga agtccctgag | 1860 |
| acggtaaaga tgcaggagtg gccggcagag cagtgggcat caacctggca ggggccaccc | 1920 |
| agatgcctgc tcagtgttgt gggccatttg tccagaaggg gacggcagca gctgtagctg | 1980 |
| gctcctccgg ggtccaggca gcaggccaca gggcagaact gaccatctgg gcaccgcgtt | 2040 |
| ccagccacca gccctgctgt taaggccacc cagctcacca gggtccacat ggtctgcctg | 2100 |
| cgtccgactc cgcggtcctt gggcagcagc | 2130. |

[0470] Exemplary gRNA spacer sequences of the disclosure that specifically bind to a target sequence of an RNA molecule encoding a Progranulin (GRN) protein of the disclosure may comprise or consist of a nucleic acid having a sequence selected from any one of any one of SEQ ID NO: 27138 to SEQ ID NO: 29242.

### RNA Molecules

[0471] In some embodiments of the compositions and methods of the disclosure, an RNA molecule of the disclosure comprises a target RNA sequence. In some embodiments, a pathogenic RNA comprises the target RNA sequence or the target sequence is associated with the pathogenic RNA. In some embodiments, the RNA molecule of the disclosure comprises at least one target sequence. In some embodiments, the RNA molecule of the disclosure comprises one or more target sequence(s). In some embodiments, the RNA molecule of the disclosure comprises two or more target sequences. In some embodiments the target RNA is non-coding RNA.

[0472] In some embodiments of the compositions and methods of the disclosure, an RNA molecule of the disclosure is a naturally occurring RNA molecule. In some embodiments, the RNA molecule of the disclosure is a non-naturally occurring molecule. Exemplary non-naturally occurring RNA molecules may comprise or consist of sequence variations or mutations, chimeric sequences, exogenous sequences, heterologous sequences, chimeric sequences, recombinant sequences, sequences comprising a modified or synthetic nucleotide or any combination thereof.

[0473] In some embodiments of the compositions and methods of the disclosure, an RNA molecule of the disclosure comprises or consists of a sequence isolated or derived from a virus.

[0474] In some embodiments of the compositions and methods of the disclosure, an RNA molecule of the disclosure comprises or consists of a sequence isolated or derived from a prokaryotic organism. In some embodiments, an RNA molecule of the disclosure comprises or consists of a sequence isolated or derived from a species or strain of archaea or a species or strain of bacteria.

[0475] In some embodiments of the compositions and methods of the disclosure, the RNA molecule of the disclosure comprises or consists of a sequence isolated or derived from a eukaryotic organism. In some embodiments, an RNA molecule of the disclosure comprises or consists of a sequence isolated or derived from a species of protozoa, parasite, protist, algae, fungi, yeast, amoeba, worm, microorganism, invertebrate, vertebrate, insect, rodent, mouse, rat, mammal, or a primate. In some embodiments, an RNA molecule of the disclosure comprises or consists of a sequence isolated or derived from a human.

[0476] In some embodiments of the compositions and methods of the disclosure, the RNA molecule of the disclosure comprises or consists of a sequence derived from a coding sequence from a genome of an organism or a virus. In some embodiments, the RNA molecule of the disclosure comprises or consists of a primary RNA transcript, a precursor messenger RNA (pre-mRNA) or messenger RNA (mRNA). In some embodiments, the RNA molecule of the disclosure comprises or consists of a gene product that has not been processed (e.g. a transcript). In some embodiments, the RNA molecule of the disclosure comprises or consists of a gene product that has been subject to post-transcriptional processing (e.g. a transcript comprising a 5′cap and a 3′ polyadenylation signal). In some embodiments, the RNA molecule of the disclosure comprises or consists of a gene product that has been subject to alternative splicing (e.g. a splice variant). In some embodiments, the RNA molecule of the disclosure comprises or consists of a gene product that has been subject to removal of non-coding and/or intronic sequences (e.g. a messenger RNA (mRNA)).

[0477] In some embodiments of the compositions and methods of the disclosure, the RNA molecule of the disclosure comprises or consists of a sequence derived from a non-coding sequence (e.g. a non-coding RNA (ncRNA)). In some embodiments, the RNA molecule of the disclosure comprises or consists of a ribosomal RNA. In some embodiments, the RNA molecule of the disclosure comprises or consists of a small ncRNA molecule. Exemplary small RNA molecules of the disclosure include, but are not limited to, microRNAs (miRNAs), small interfering (siRNAs), piwi-interacting RNAs (piRNAs), small nucleolar RNAs (snoRNAs), small nuclear RNAs (snRNAs), extracellular or exosomal RNAs (exRNAs), and small Cajal body-specific RNAs (scaRNAs). In some embodiments, the RNA molecule of the disclosure comprises or consists of a long ncRNA molecule. Exemplary long RNA molecules of the disclosure include, but are not limited to, X-inactive specific transcript (Xist) and HOX transcript antisense RNA (HOTAIR).

[0478] In some embodiments of the compositions and methods of the disclosure, the RNA molecule of the disclosure contacted by a composition of the disclosure in an intracellular space. In some embodiments, the RNA molecule of the disclosure contacted by a composition of the disclosure in a cytosolic space. In some embodiments, the RNA molecule of the disclosure contacted by a composition of the disclosure in a nucleus. In some embodiments, the RNA molecule of the disclosure contacted by a composition of the disclosure in a vesicle, membrane-bound compartment of a cell, or an organelle.

[0479] In some embodiments of the compositions and methods of the disclosure, the RNA molecule of the disclosure contacted by a composition of the disclosure in an extracellular space. In some embodiments, the RNA molecule of the disclosure contacted by a composition of the disclosure in an exosome. In some embodiments, the RNA molecule of the disclosure contacted by a composition of the disclosure in a liposome, a polymersome, a micelle or a nanoparticle. In some embodiments, the RNA molecule of the disclosure contacted by a composition of the disclosure in an extracellular matrix. In some embodiments, the RNA molecule of the disclosure contacted by a composition of the disclosure in a droplet. In some embodiments, the RNA molecule of the disclosure contacted by a composition of the disclosure in a microfluidic droplet.

[0480] In some embodiments of the compositions and methods of the disclosure, a RNA molecule of the disclosure comprises or consists of a single-stranded sequence. In some embodiments, the RNA molecule of the disclosure comprises or consists of a double-stranded sequence. In some embodiments, the double-stranded sequence comprises two RNA molecules. In some embodiments, the double-stranded sequence comprises one RNA molecule and one DNA molecule. In some embodiments, including those wherein the double-stranded sequence comprises one RNA molecule and one DNA molecule, compositions of the disclosure selectively bind and, optionally, selectively cut the RNA molecule.

### RNA-Binding Endonucleases

[0481] In some embodiments of the compositions of the disclosure, there may be an optional second RNA binding protein which comprises or consists of a nuclease or endonuclease domain. In some embodiments, the second RNA-binding protein is an effector protein. In some embodiments, the second RNA binding protein binds RNA in a manner in which it associates with RNA. In some embodiments, the second RNA binding protein associates with RNA in a manner in which it cleaves RNA. In some embodiments, the second RNA-binding protein is fused to a first RNA-binding protein which is a PUF, PUMBY, or PPR-based protein.

[0482] In some embodiments of the compositions of the disclosure, the second RNA binding protein comprises or consists of an RNAse.

[0483] In some embodiments, the second RNA binding protein comprises or consists of an RNAse1. In some embodiments, the RNAse1 protein comprises or consists of SEQ ID NO: 325.

[0484] In some embodiments, the second RNA binding protein comprises or consists of an RNAse4. In some embodiments, the RNAse4 protein comprises or consists of SEQ ID NO: 326.

[0485] In some embodiments, the second RNA binding protein comprises or consists of an RNAse6. In some embodiments, the RNAse6 protein comprises or consists of SEQ ID NO: 327.

[0486] In some embodiments, the second RNA binding protein comprises or consists of an RNAse7. In some embodiments, the RNAse7 protein comprises or consists of SEQ ID NO: 328.

[0487] In some embodiments, the second RNA binding protein comprises or consists of an RNAse8. In some embodiments, the RNAse8 protein comprises or consists of SEQ ID NO: 329.

[0488] In some embodiments, the second RNA binding protein comprises or consists of an RNAse2. In some embodiments, the RNAse2 protein comprises or consists of SEQ ID NO: 330.

[0489] In some embodiments, the second RNA binding protein comprises or consists of an RNAse6PL. In some embodiments, the RNAse6PL protein comprises or consists of SEQ ID NO: 331.

[0490] In some embodiments, the second RNA binding protein comprises or consists of an RNAseL. In some embodiments, the RNAseL protein comprises or consists of SEQ ID NO: 332.

[0491] In some embodiments, the second RNA binding protein comprises or consists of an RNAseT2. In some embodiments, the RNAseT2 protein comprises or consists of SEQ ID NO: 333.

[0492] In some embodiments, the second RNA binding protein comprises or consists of an RNAse11. In some embodiments, the RNAse11 protein comprises or consists of SEQ ID NO: 334.

[0493] In some embodiments, the second RNA binding protein comprises or consists of an RNAseT2-like. In some embodiments, the RNAseT2-like protein comprises or consists of SEQ ID NO: 335.

[0494] In some embodiments of the compositions of the disclosure, the second RNA binding protein comprises or consists of a mutated RNAse.

[0495] In some embodiments, the second RNA binding protein comprises or consists of a mutated Rnase1 (Rnase1(K41R)) polypeptide. In some embodiments, the Rnase1(K41R) polypeptide comprises or consists of SEQ ID NO: 336.

[0496] In some embodiments, the second RNA binding protein comprises or consists of a mutated Rnase1 (Rnase1(K41R, D121E)) polypeptide. In some embodiments, the Rnase1 (Rnase1(K41R, D121E)) polypeptide comprises or consists of SEQ ID NO: 337.

[0497] In some embodiments, the second RNA binding protein comprises or consists of a mutated Rnase1 (Rnase1(K41R, D121E, H119N)) polypeptide. In some embodiments, the Rnase1 (Rnase1(K41R, D121E, H119N)) polypeptide comprises or consists of SEQ ID NO: 338.

[0498] In some embodiments, the second RNA binding protein comprises or consists of a mutated Rnase1. In some embodiments, the second RNA binding protein comprises or consists of a mutated Rnase1 (Rnase1(H119N)) polypeptide. In some embodiments, the Rnase1 (Rnase1(H119N)) polypeptide comprises or consists of SEQ ID NO: 339.

[0499] In some embodiments, the second RNA binding protein comprises or consists of a mutated Rnase1 (Rnase1(R39D, N67D, N88A, G89D, R91D, H19N)) polypeptide.

[0500] In some embodiments, the Rnase1 (Rnase1(R39D, N67D, N88A, G89D, R91D, H119N)) polypeptide comprises or consists of SEQ ID NO: 340.

[0501] In some embodiments, the second RNA binding protein comprises or consists of a mutated Rnase1 (Rnase1(R39D, N67D, N88A, G89D, R91D, H119N)) polypeptide. In some embodiments, the Rnase1 (Rnase1(R39D, N67D, N88A, G89D, R91D, H119N, K41R, D121E)) polypeptide comprises or consists of SEQ ID NO: 341.

[0502] In some embodiments, the second RNA binding protein comprises or consists of a mutated Rnase1 (Rnase1(R39D, N67D, N88A, G89D, R91D, H119N)) polypeptide. In some embodiments, the Rnase1 (Rnase1(R39D, N67D, N88A, G89D, R91D)) polypeptide comprises or consists of SEQ ID NO: 342.

[0503] In some embodiments, the second RNA binding protein comprises or consists of a mutated Rnase1 (Rnase1 (R39D, N67D, N88A, G89D, R91D, H119N, K41R, D121E)) polypeptide that comprises or consists of SEQ ID NO: 343.

[0504] In some embodiments of the compositions of the disclosure, the second RNA binding protein comprises or consists of a NOB1 polypeptide. In some embodiments, the NOB1 polypeptide comprises or consists of SEQ ID NO: 344.

[0505] In some embodiments of the compositions of the disclosure, the second RNA binding protein comprises or consists of an endonuclease. In some embodiments, the second RNA binding protein comprises or consists of an endonuclease V (ENDOV). In some embodiments, the ENDOV protein comprises or consists of SEQ ID NO: 345.

[0506] In some embodiments, the second RNA binding protein comprises or consists of an endonuclease G (ENDOG). In some embodiments, the ENDOG protein comprises or consists of SEQ ID NO: 346.

[0507] In some embodiments, the second RNA binding protein comprises or consists of an endonuclease D1 (ENDOD1). In some embodiments, the ENDOD1 protein comprises or consists of SEQ ID NO: 347.

[0508] In some embodiments, the second RNA binding protein comprises or consists of a Human flap endonuclease-1 (hFEN1). In some embodiments, the hFEN1 polypeptide comprises or consists of SEQ ID NO: 348.

[0509] In some embodiments, the second RNA binding protein comprises or consists of a DNA repair endonuclease XPF (ERCC4) polypeptide. In some embodiments, the ERCC4 polypeptide comprises or consists of SEQ ID NO: 349.

[0510] In some embodiments of the compositions of the disclosure, the second RNA binding protein comprises or consists of an Endonuclease III-like protein 1 (NTHL) polypeptide. In some embodiments, the NTHL polypeptide comprises or consists of SEQ ID NO: 340.

[0511] In some embodiments of the compositions of the disclosure, the second RNA binding protein comprises or consists of a human Schlafen 14 (hSLFN14) polypeptide. In some embodiments, the hSLFN14 polypeptide comprises or consists of SEQ ID NO: 351.

[0512] In some embodiments of the compositions of the disclosure, the second RNA binding protein comprises or consists of a human beta-lactamase-like protein 2 (hLACTB2) polypeptide. In some embodiments, the hLACTB2 polypeptide comprises or consists of SEQ ID NO: 352.

[0513] In some embodiments of the compositions of the disclosure, the second RNA binding protein comprises or consists of an apurinic/apyrimidinic (AP) endodeoxyribonuclease (APEX) polypeptide. In some embodiments, the second RNA binding protein comprises or consists of an apurinic/apyrimidinic (AP) endodeoxyribonuclease (APEX2) polypeptide. In some embodiments, the APEX2 polypeptide comprises or consists of SEQ ID NO: 353.

[0514] In some embodiments, the APEX2 polypeptide comprises or consists of SEQ ID NO: 354.

[0515] In some embodiments, the second RNA binding protein comprises or consists of an apurinic or apyrimidinic site lyase (APEX1) polypeptide. In some embodiments, the APEX1 polypeptide comprises or consists of SEQ ID NO: 355.

[0516] In some embodiments of the compositions of the disclosure, the second RNA binding protein comprises or consists of an angiogenin (ANG) polypeptide. In some embodiments, the ANG polypeptide comprises or consists of SEQ ID NO: 356.

[0517] In some embodiments of the compositions of the disclosure, the second RNA binding protein comprises or consists of a heat responsive protein 12 (HRSP12) polypeptide. In some embodiments, the HRSP12 polypeptide comprises or consists of SEQ ID NO: 357.

[0518] In some embodiments of the compositions of the disclosure, the second RNA binding protein comprises or consists of a Zinc Finger CCCH-Type Containing 12A (ZC3H12A) polypeptide. In some embodiments, the ZC3H12A polypeptide comprises or consists of SEQ ID NO: 358.

[0519] In some embodiments, the ZC3H12A polypeptide comprises or consists of SEQ ID NO: 359.

[0520] In some embodiments of the compositions of the disclosure, the second RNA binding protein comprises or consists of a Reactive Intermediate Imine Deaminase A (RIDA) polypeptide. In some embodiments, the RIDA polypeptide comprises or consists of SEQ ID NO: 360.

[0521] In some embodiments of the compositions of the disclosure, the second RNA binding protein comprises or consists of a Phospholipase D Family Member 6 (PDL6) polypeptide. In some embodiments, the PDL6 polypeptide comprises or consists of SEQ ID NO: 361.

[0522] In some embodiments of the compositions of the disclosure, the second RNA binding protein comprises or consists of a mitochondrial ribonuclease P catalytic subunit (KIAA0391) polypeptide. In some embodiments, the KIAA0391 polypeptide comprises or consists of SEQ ID NO: 362.

[0523] In some embodiments of the compositions of the disclosure, the second RNA binding protein comprises or consists of an argonaute 2 (AGO2) polypeptide.

[0524] In some embodiments of the compositions of the disclosure, the AGO2 polypeptide comprises or consists of SEQ ID NO: 363.

[0525] In some embodiments of the compositions of the disclosure, the second RNA binding protein comprises or consists of a mitochondrial nuclease EXOG (EXOG) polypeptide. In some embodiments, the EXOG polypeptide comprises or consists of SEQ ID NO: 364.

[0526] In some embodiments of the compositions of the disclosure, the second RNA binding protein comprises or consists of a Zinc Finger CCCH-Type Containing 12D (ZC3H12D) polypeptide. In some embodiments, the ZC3H12D polypeptide comprises or consists of SEQ ID NO: 365.

[0527] In some embodiments of the compositions of the disclosure, the second RNA binding protein comprises or consists of an endoplasmic reticulum to nucleus signaling 2 (ERN2) polypeptide. In some embodiments, the ERN2 polypeptide comprises or consists of SEQ ID NO: 366.

[0528] In some embodiments of the compositions of the disclosure, the second RNA binding protein comprises or consists of a pelota mRNA surveillance and ribosome rescue factor (PELO) polypeptide. In some embodiments, the PELO polypeptide comprises or consists of SEQ ID NO: 367.

[0529] In some embodiments of the compositions of the disclosure, the second RNA binding protein comprises or consists of a YBEY metallopeptidase (YBEY) polypeptide. In some embodiments, the YBEY polypeptide comprises or consists of SEQ ID NO: 368.

[0530] In some embodiments of the compositions of the disclosure, the second RNA binding protein comprises or consists of a cleavage and polyadenylation specific factor 4 like (CPSF4L) polypeptide. In some embodiments, the CPSF4L polypeptide comprises or consists of SEQ ID NO: 369.

[0531] In some embodiments of the compositions of the disclosure, the second RNA binding protein comprises or consists of an hCG_2002731 polypeptide. In some embodiments, the hCG_2002731 polypeptide comprises or consists of SEQ ID NO: 370.

[0532] In some embodiments, the hCG_2002731 polypeptide comprises or consists of SEQ ID NO: 371.

[0533] In some embodiments of the compositions of the disclosure, the second RNA binding protein comprises or consists of an Excision Repair Cross-Complementation Group 1 (ERCC1) polypeptide. In some embodiments, the ERCC1 polypeptide comprises or consists of SEQ ID NO: 372.

[0534] In some embodiments of the compositions of the disclosure, the second RNA binding protein comprises or consists of a ras-related C3 botulinum toxin substrate 1 isoform (RAC1) polypeptide. In some embodiments, the RAC1 polypeptide comprises or consists of SEQ ID NO: 373.

[0535] In some embodiments of the compositions of the disclosure, the second RNA binding protein comprises or consists of a Ribonuclease A A1 (RAA1) polypeptide. In some embodiments, the RAA1 polypeptide comprises or consists of SEQ ID NO: 374.

[0536] In some embodiments of the compositions of the disclosure, the second RNA binding protein comprises or consists of a Ras Related Protein (RAB1) polypeptide. In some embodiments, the RAB1 polypeptide comprises or consists of SEQ ID NO: 375.

[0537] In some embodiments of the compositions of the disclosure, the second RNA binding protein comprises or consists of a DNA Replication Helicase/Nuclease 2 (DNA2) polypeptide. In some embodiments, the DNA2 polypeptide comprises or consists of SEQ ID NO: 376.

[0538] In some embodiments of the compositions of the disclosure, the second RNA binding protein comprises or consists of a FLJ35220 polypeptide. In some embodiments, the FLJ35220 polypeptide comprises or consists of SEQ ID NO: 377.

[0539] In some embodiments of the compositions of the disclosure, the second RNA binding protein comprises or consists of a FLJ13173 polypeptide. In some embodiments, the FLJ13173 polypeptide comprises or consists of SEQ ID NO: 378.

[0540] In some embodiments of the compositions of the disclosure, the second RNA binding protein comprises or consists of Teneurin Transmembrane Protein (TENM) polypeptide. In some embodiments, the second RNA binding protein comprises or consists of Teneurin Transmembrane Protein 1 (TENM1) polypeptide. In some embodiments, the TENM1 polypeptide comprises or consists of SEQ ID NO: 379.

[0541] In some embodiments, the second RNA binding protein comprises or consists of Teneurin Transmembrane Protein 2 (TENM2) polypeptide. In some embodiments, the TENM2 polypeptide comprises or consists of SEQ ID NO: 380.

[0542] In some embodiments of the compositions of the disclosure, the second RNA binding protein comprises or consists of a Ribonuclease Kappa (RNAseK) polypeptide. In some embodiments, the RNAseK polypeptide comprises or consists of SEQ ID NO: 381.

[0543] In some embodiments of the compositions of the disclosure, the second RNA binding protein comprises or consists of a transcription activator-like effector nuclease (TALEN) polypeptide or a nuclease domain thereof. In some embodiments, the TALEN polypeptide comprises or consists of SEQ ID NO: 382. In some embodiments, the TALEN polypeptide comprises or consists of SEQ ID NO: 383.

[0544] In some embodiments of the compositions of the disclosure, the second RNA binding protein comprises or consists a zinc finger nuclease polypeptide or a nuclease domain thereof. In some embodiments, the second RNA binding protein comprises or consists of a ZNF638 polypeptide or a nuclease domain thereof. In some embodiments, the ZNF638 polypeptide polypeptide comprises or consists of SEQ ID NO: 384.

[0545] In some embodiments of the compositions of the disclosure, the second RNA binding protein comprises or consists of a PIN domain derived from the human SMG6 protein, also commonly known as telomerase-binding protein EST1A isoform 3, NCBI Reference Sequence: NP_001243756.1. In some embodiments, the PIN from hSMG6 is used herein in the form of a Cas fusion protein and as an internal control, for example, and without limitation, see FIG. 9, which shows PIN-dSauCas9, PIN-dSauCas9dHNH, PIN-dSPCas9, and dcjeCas9-PIN.

[0546] In some embodiments of the compositions of the disclosure, the composition further comprises (a) a sequence comprising a gRNA that specifically binds within an RNA molecule and (b) a sequence encoding a nuclease. In some embodiments, a nuclease comprises a sequence isolated or derived from a CRISPR/Cas protein. In some embodiments, the CRISPR/Cas protein is isolated or derived from any one of a type I, a type IA, a type IB, a type IC, a type ID, a type IE, a type IF, a type IU, a type III, a type IIIA, a type IIIB, a type IIIC, a type IIID, a type IV, a type IVA, a type IVB, a type II, a type IIA, a type IIB, a type IIC, a type V, or a type VI CRISPR/Cas protein. In some embodiments, a nuclease comprises a sequence isolated or derived from a TALEN or a nuclease domain thereof. In some embodiments, a nuclease comprises a sequence isolated or derived from a zinc finger nuclease or a nuclease domain thereof.

### Fusion Proteins

[0547] In some embodiments of the compositions and methods of the disclosure, the composition comprises a sequence encoding a target RNA-binding fusion protein comprising (a) a sequence encoding a first RNA-binding polypeptide or portion thereof, and optionally (b) a sequence encoding a second RNA-binding polypeptide, wherein the first RNA-biding polypeptide binds a target RNA, and wherein the second RNA-binding polypeptide comprises RNA-nuclease activity.

[0548] In some embodiments, a target RNA-binding fusion protein is an RNA-guided target RNA-binding fusion protein. RNA-guided target RNA-binding fusion proteins comprise at least one RNA-binding polypeptide which corresponds to a gRNA which guides the RNA-binding polypeptide to target RNA. RNA-guided target RNA-binding fusion proteins include without limitation, RNA-binding polypeptides which are CRISPR/Cas-based RNA-binding polypeptides or portions thereof.

[0549] In some embodiments, a target RNA-binding fusion protein is not an RNA-guided target RNA-binding fusion protein and as such comprises at least one RNA-binding polypeptide which is capable of binding a target RNA without a corresponding gRNA sequence. Such non-guided RNA-binding polypeptides include, without limitation, at least one RNA-binding protein or RNA-binding portion thereof which is a PUF (Pumilio and FBF homology family). This type RNA-binding polypeptide can be used in place of a gRNA-guided RNA binding protein such as CRISPR/Cas. The unique RNA recognition mode of PUF proteins (named for Drosophila Pumilio and C. elegans fem-3 binding factor) that are involved in mediating mRNA stability and translation are well known in the art. The PUF domain of human Pumiliol, also known in the art, binds tightly to cognate RNA sequences and its specificity can be modified. It contains eight PUF repeats that recognize eight consecutive RNA bases with each repeat recognizing a single base. Since two amino acid side chains in each repeat recognize the Watson-Crick edge of the corresponding base and determine the specificity of that repeat, a PUF domain can be designed to specifically bind most 8-nt RNA. Wang et al., Nat Methods. 2009; 6(11): 825-830. See also WO2012/068627 which is incorporated by reference herein in its entirety.

[0550] The modular nature of the PUF-RNA interaction has been used to rationally engineer the binding specificity of PUF domains (Cheong, C. G. & Hall, T. M. (2006) PNAS 103: 13635-13639; Wang, X. et al (2002) Cell 110: 501-512). However, only the successful design of PUF domains with repeats that recognize adenine, guanine or uracil have been reported prior to the teachings of WO2012/06827 supra. While the wild-type PumHD does not bind C, molecular engineering has shown that some of the Pum units can be mutated to bind C with good yield and specificity. See e.g., Dong, S. et al. Specific and modular binding code for cytosine recognition in Pumilio/FBF (PUF) RNA-binding domains, The Journal of biological chemistry 286, 26732-26742 (2011). Accordingly, PumHD is a modified version of the WT Pumilio protein that exhibits programmable binding to arbitrary 8-base sequences of RNA. Each of the eight units of PumHD can bind to all four RNA bases, and the RNA bases flanking the target sequence do not affect binding. See also the following for art-recognized RNA-binding rules of PUF design: Filipovska A, Razif M F, Nygørd KK, & Rackham O. A universal code for RNA recognition by PUF proteins. Nature chemical biology, 7(7), 425-427 (2011); Filipovska A, & Rackham O. Modular recognition of nucleic acids by PUF, TALE and PPR proteins. Molecular BioSystems, 8(3), 699-708 (2012); Abil Z, Denard C A, & Zhao H. Modular assembly of designer PUF proteins for specific post-transcriptional regulation of endogenous RNA. Journal of biological engineering, 8(1), 7 (2014); Zhao Y, Mao M, Zhang W, Wang J, Li H, Yang Y, Wang Z, & Wu J. Expanding RNA binding specificity and affinity of engineered PUF domains. Nucleic Acids Research, 46(9), 4771-4782 (2018); Shinoda K, Tsuji S, Futaki S, & Imanishi M. Nested PUF Proteins: Extending Target RNA Elements for Gene Regulation. ChemBioChem, 19(2), 171-176 (2018); Koh Y Y, Wang Y, Qiu C, Opperman L, Gross L, Tanaka Hall T M, & Wickens M. Stacking Interactions in PUF-RNA Complexes. RNA, 17(4), 718-727 (2011).

[0551] As such, it is well known in the art that human PUM1 (1186 amino acids) contains an RNA-binding domain (RBD) in the C-terminus of the protein (also known as Pumilio homology domain PUM-HD amino acid 828-amino acid 1175) and that PUFs are based on the RBD of human PUM1. There are 8 structural repeat modules of 36 amino acids (except module 7 has 43 amino acids) for RNA binding and flanking N- and C-terminal regions important for protein structure and stability. Within each repeat module, amino acids 12, 13, and 16 are important for RNA binding with 12 and 16 controlling RNA base recognition. Amino acid 13 stacks with RNA bases and can be modified to tune specificity and affinity. Alternatively, the PUF design may maintain amino acid 13 as human PUM1's native residue. Recognition occurs in reverse orientation as N- and C-terminal PUF recognizes 3′ to 5′ RNA. Accordingly, PUF engineering of 8 modules (8PUF), as known in the art, mimics a human protein. An exemplary 8-mer RNA recognition (8PUF) would designed as follows: R1′-R1-R2-R3-R4-R5-R6-R7-R8-R8′. In one embodiment, an 8PUF is used as the RBD. In another embodiment, a variation of the 8PUF design is used to create a 12-mer RNA recognition (12PUF) RBD or a 16-mer RNA recognition (16PUF) RBD. Repeats 1-8 of wild type human PUM1 are provided herewith at SEQ ID NOS: 609-616, respectively. The nucleic acid sequence encoding the PUF domain from human PUM1 is SEQ ID NO: 617 and the amino acid sequence of the PUF domain from human PUM1 amino acids 828-176 is SEQ ID NO: 618. See also U.S. Pat. No. 9,580,714 which is incorporated herein in its entirety.

[0552] In some embodiments of the non-guided RNA-binding fusion proteins of the disclosure, the fusion protein comprises at least one RNA-binding protein or RNA-binding portion thereof which is a PUMBY (Pumilio-based assembly) protein. RNA-binding protein PumHD, which has been widely used in native and modified form for targeting RNA, has been engineered into a protein architecture designed to yield a set of four canonical protein modules, each of which targets one RNA base. These modules (i.e., Pumby, for Pumilio-based assembly) are concatenated in chains of varying composition and length, to bind desired target RNAs. In essence, PUMBY is a more simple and modular form of PumHD, in which a single protein unit of PumHD is concatenated into arrays of arbitrary size and binding sequence specificity. The specificity of such Pumby-RNA interactions is high, with undetectable binding of a Pumby chain to RNA sequences that bear three or more mismatches from the target sequence. Katarzyna et al., PNAS, 2016; 113(19): E2579-E2588. See also US 2016/0238593 which is incorporated by reference herein in its entirety.

[0553] In some embodiments of the compositions of the disclosure, the first RNA binding protein comprises a Pumilio and FBF (PUF) protein. In some embodiments, the first RNA binding protein comprises a Pumilio-based assembly (PUMBY) protein. In some embodiments, the PUF or PUMBY RNA-binding proteins are fused with a nuclease domain such as E17.

[0554] Exemplary PUF RNA-binding protein used in the compositions and methods disclosed herein are as follows:

[0555] In some embodiments, a PUF26 protein (original sequence) of the disclosure comprises or consists of the amino acid sequence of SEQ ID NO: 393.

[0556] In some embodiments, a PUF26 protein of the disclosure is encoded by an optimized nucleic acid sequence comprising or consisting of SEQ ID NO: 394.

[0557] In some embodiments, a PUF54 protein (original sequence) of the disclosure comprises or consists of the amino acid sequence of SEQ ID NO: 395.

[0558] In some embodiments, a PUF54 protein of the disclosure is encoded by an optimized nucleic acid sequence comprising or consisting of SEQ ID NO: 396.

[0559] In some embodiments, a PUF60 protein (original sequence) of the disclosure comprises or consists of the amino acid sequence of SEQ ID NO: 397.

[0560] In some embodiments, a PUF60 protein of the disclosure is encoded by an optimized nucleic acid sequence comprising or consisting of SEQ ID NO: 398.

[0561] In some embodiments, a PUF110 protein (original sequence) of the disclosure comprises or consists of the amino acid sequence of SEQ ID NO: 399.

[0562] In some embodiments, a PUF110 protein of the disclosure is encoded by an optimized nucleic acid sequence comprising or consisting of SEQ ID NO: 400.

[0563] Exemplary PUF RNA-binding proteins (targeting 8 Rho nucleotides) used in the compositions and methods disclosed herein are as follows:

[0564] In some embodiments, a PUF08 (targeting 8 nucleotides) of the disclosure comprises or consists of the amino acid sequence of SEQ ID NO: 491.

[0565] In some embodiments, a PUF08 (targeting 8 nucleotides) of the disclosure is encoded by a nucleic acid sequence comprising or consisting of SEQ ID NO: 492.

[0566] In some embodiments, a PUF16 (targeting 8 nucleotides) of the disclosure comprises or consists of the amino acid sequence of SEQ ID NO: 493.

[0567] In some embodiments, a PUF16 (targeting 8 nucleotides) of the disclosure is encoded by a nucleic acid sequence comprising or consisting of SEQ ID NO: 494.

[0568] In some embodiments, a PUF22 (targeting 8 nucleotides) of the disclosure comprises or consists of the amino acid sequence of SEQ ID NO: 495.

[0569] In some embodiments, a PUF22 (targeting 8 nucleotides) of the disclosure is encoded by a nucleic acid sequence comprising or consisting of SEQ ID NO: 496.

[0570] In some embodiments, a PUF34 (targeting 8 nucleotides) of the disclosure comprises or consists of the amino acid sequence of SEQ ID NO: 497.

[0571] In some embodiments, a PUF34 (targeting 8 nucleotides) of the disclosure is encoded by a nucleic acid sequence comprising or consisting of SEQ ID NO: 498.

[0572] In some embodiments, a PUF56 (targeting 8 nucleotides) of the disclosure comprises or consists of the amino acid sequence of SEQ ID NO: 499.

[0573] In some embodiments, a PUF56 (targeting 8 nucleotides) of the disclosure is encoded by a nucleic acid sequence comprising or consisting of SEQ ID NO: 500.

[0574] In some embodiments, a PUF64 (targeting 8 nucleotides) of the disclosure comprises or consists of the amino acid sequence of SEQ ID NO: 501.

[0575] In some embodiments, a PUF64 (targeting 8 nucleotides) of the disclosure is encoded by a nucleic acid sequence comprising or consisting of SEQ ID NO: 502.

[0576] In some embodiments, a PUF66 (targeting 8 nucleotides) of the disclosure comprises or consists of the amino acid sequence of SEQ ID NO: 503.

[0577] In some embodiments, a PUF66 (targeting 8 nucleotides) of the disclosure is encoded by a nucleic acid sequence comprising or consisting of SEQ ID NO: 504.

[0578] In some embodiments, a PUF90 (targeting 8 nucleotides) of the disclosure comprises or consists of the amino acid sequence of SEQ ID NO: 505.

[0579] In some embodiments, a PUF90 (targeting 8 nucleotides) of the disclosure is encoded by a nucleic acid sequence comprising or consisting of SEQ ID NO: 506.

[0580] In some embodiments, a PUF102 (targeting 8 nucleotides) of the disclosure comprises or consists of the amino acid sequence of SEQ ID NO: 507.

[0581] In some embodiments, a PUF102 (targeting 8 nucleotides) of the disclosure is encoded by a nucleic acid sequence comprising or consisting of SEQ ID NO: 508.

[0582] In some embodiments, a PUF112 (targeting 8 nucleotides) of the disclosure comprises or consists of the amino acid sequence of SEQ ID NO: 509.

[0583] In some embodiments, a PUF112 (targeting 8 nucleotides) of the disclosure is encoded by a nucleic acid sequence comprising or consisting of SEQ ID NO: 510.

[0584] In some embodiments, a PUF122 (targeting 8 nucleotides) of the disclosure comprises or consists of the amino acid sequence of SEQ ID NO: 511.

[0585] In some embodiments, a PUF122 (targeting 8 nucleotides) of the disclosure is encoded by a nucleic acid sequence comprising or consisting of SEQ ID NO: 512.

[0586] In some embodiments, a PUF128 (targeting 8 nucleotides) of the disclosure comprises or consists of the amino acid sequence of SEQ ID NO: 513.

[0587] In some embodiments, a PUF128 (targeting 8 nucleotides) of the disclosure is encoded by a nucleic acid sequence comprising or consisting of SEQ ID NO: 514.

[0588] In some embodiments, a PUF130 (targeting 8 nucleotides) of the disclosure comprises or consists of the amino acid sequence of SEQ ID NO: 515.

[0589] In some embodiments, a PUF130 (targeting 8 nucleotides) of the disclosure is encoded by a nucleic acid sequence comprising or consisting of SEQ ID NO: 516.

[0590] In some embodiments, a PUF154 (targeting 8 nucleotides) of the disclosure comprises or consists of the amino acid sequence of SEQ ID NO: 517.

[0591] In some embodiments, a PUF154 (targeting 8 nucleotides) of the disclosure is encoded by a nucleic acid sequence comprising or consisting of SEQ ID NO: 518.

[0592] In some embodiments, a PUF166 (targeting 8 nucleotides) of the disclosure comprises or consists of the amino acid sequence of SEQ ID NO: 519.

[0593] In some embodiments, a PUF166 (targeting 8 nucleotides) of the disclosure is encoded by a nucleic acid sequence comprising or consisting of SEQ ID NO: 520.

[0594] Exemplary PUF RNA-binding proteins (targeting 16 Rho nucleotides) are as follows:

[0595] In some embodiments, a PUF26 (Design 1-P001IS) of the disclosure comprises or consists of the amino acid sequence of SEQ ID NO: 521.

[0596] In some embodiments, a PUF26 (Design 1-P001IS) of the disclosure is encoded by a nucleic acid sequence comprising or consisting of SEQ ID NO: 522.

[0597] In some embodiments, a PUF26 (Design 2-P001KZ) of the disclosure comprises or consists of the amino acid sequence of SEQ ID NO: 523.

[0598] In some embodiments, a PUF26 (Design 2-P001KZ) of the disclosure is encoded by a nucleic acid sequence comprising or consisting of SEQ ID NO: 524.

[0599] In some embodiments, a PUF26 (Design 3-P001LE) of the disclosure comprises or consists of the amino acid sequence of SEQ ID NO: 525.

[0600] In some embodiments, a PUF26 (Design 3-P001LE) of the disclosure is encoded by a nucleic acid sequence comprising or consisting of SEQ ID NO: 526.

[0601] In some embodiments, a PUF54 (Design 1-P001T) of the disclosure comprises or consists of the amino acid sequence of SEQ ID NO: 527.

[0602] In some embodiments, a PUF54 (Design 1-P001T) of the disclosure is encoded by a nucleic acid sequence comprising or consisting of SEQ ID NO: 528.

[0603] In some embodiments, a PUF54 (Design 2-P001LA) of the disclosure comprises or consists of the amino acid sequence of SEQ ID NO: 529.

[0604] In some embodiments, a PUF54 (Design 2-P001LA) of the disclosure is encoded by a nucleic acid sequence comprising or consisting of SEQ ID NO: 530.

[0605] In some embodiments, a PUF54 (Design 3-P001LF) of the disclosure comprises or consists of the amino acid sequence of SEQ ID NO: 531.

[0606] In some embodiments, a PUF54 (Design 3-P001LF) of the disclosure is encoded by a nucleic acid sequence comprising or consisting of SEQ ID NO: 532.

[0607] In some embodiments, a PUF60 (Design 1-P001IU) of the disclosure comprises or consists of the amino acid sequence of SEQ ID NO: 533.

[0608] In some embodiments, a PUF60 (Design 1-P001IU) of the disclosure is encoded by a nucleic acid sequence comprising or consisting of SEQ ID NO: 534.

[0609] In some embodiments, a PUF60 (Design 2-P001LB) of the disclosure comprises or consists of the amino acid sequence of SEQ ID NO: 535.

[0610] In some embodiments, a PUF60 (Design 2-P001LB) of the disclosure is encoded by a nucleic acid sequence comprising or consisting of SEQ ID NO: 536.

[0611] In some embodiments, a PUF60 (Design 3-P001LG) of the disclosure comprises or consists of the amino acid sequence of SEQ ID NO: 537.

[0612] In some embodiments, a PUF60 (Design 3-P001LG) of the disclosure is encoded by a nucleic acid sequence comprising or consisting of SEQ ID NO: 538.

[0613] In some embodiments, a PUF110 (Design 1-P001IV) of the disclosure comprises or consists of the amino acid sequence of SEQ ID NO: 539.

[0614] In some embodiments, a PUF110 (Design 1-P001IV) of the disclosure is encoded by a nucleic acid sequence comprising or consisting of SEQ ID NO: 540.

[0615] In some embodiments, a PUF110 (Design 2-P001LC) of the disclosure comprises or consists of the amino acid sequence of SEQ ID NO: 541.

[0616] In some embodiments, a PUF110 (Design 2-P001LC) of the disclosure is encoded by a nucleic acid sequence comprising or consisting of SEQ ID NO: 542.

[0617] In some embodiments, a PUF110 (Design 3-P001LH) of the disclosure comprises or consists of the amino acid sequence of SEQ ID NO: 543.

[0618] In some embodiments, a PUF110 (Design 3-P001LH) of the disclosure is encoded by a nucleic acid sequence comprising or consisting of SEQ ID NO: 545.

[0619] Exemplary PUMBY RNA-binding proteins (targeting 8 Rho nucleotides) are as follows:

[0620] In some embodiments, a PUM14 protein of the disclosure comprises or consists of the amino acid sequence of SEQ ID NO: 401.

[0621] In some embodiments, a PUM14 protein of the disclosure is encoded by a nucleic acid sequence comprising or consisting of SEQ ID NO: 402.

[0622] Exemplary PUMBY RNA-binding proteins (targeting 16 Rho nucleotides) are as follows:

[0623] In some embodiments, a PUM14 protein (Design 1-P001JG) of the disclosure comprises or consists of the amino acid sequence of SEQ ID NO: 545.

[0624] In some embodiments, a PUM14 protein (Design 1-P001JG) of the disclosure is encoded by a nucleic acid sequence comprising or consisting of SEQ ID NO: 546.

[0625] In some embodiments, a PUM14 protein (Design 2-P001JB) of the disclosure comprises or consists of the amino acid sequence of SEQ ID NO: 547.

[0626] In some embodiments, a PUM14 protein (Design 2-P001JB) of the disclosure is encoded by a nucleic acid sequence comprising or consisting of SEQ ID NO: 548.

[0627] In some embodiments of the compositions of the disclosure, at least one of the RNA-binding proteins or RNA-binding portions thereof is a PPR protein. PPR proteins (proteins with pentatricopeptide repeat (PPR) motifs derived from plants) are nuclear-encoded and exclusively controlled at the RNA level organelles (chloroplasts and mitochondria), cutting, translation, splicing, RNA editing, genes specifically acting on RNA stability. PPR proteins are typically a motif of 35 amino acids and have a structure in which a PPR motif is about 10 contiguous amino acids. The combination of PPR motifs can be used for sequence-selective binding to RNA. PPR proteins are often comprised of PPR motifs of about 10 repeat domains. PPR domains or RNA-binding domains may be configured to be catalytically inactive. WO 2013/058404 incorporated herein by reference in its entirety.

[0628] In some embodiments, the fusion protein disclosed herein comprises a linker between the at least two RNA-binding polypeptides. In some embodiments, the linker is a peptide linker. In some embodiments, the peptide linker comprises one or more repeats of the tri-peptide GGS. In other embodiments, the linker is a non-peptide linker. In some embodiments, the non-peptide linker comprises polyethylene glycol (PEG), polypropylene glycol (PPG), co-poly(ethylene/propylene) glycol, polyoxyethylene (POE), polyurethane, polyphosphazene, polysaccharides, dextran, polyvinyl alcohol, polyvinylpyrrolidones, polyvinyl ethyl ether, polyacryl amide, polyacrylate, polycyanoacrylates, lipid polymers, chitins, hyaluronic acid, heparin, or an alkyl linker.

[0629] In some embodiments, the at least one RNA-binding protein does not require multimerization for RNA-binding activity. In some embodiments, the at least one RNA-binding protein is not a monomer of a multimer complex. In some embodiments, a multimer protein complex does not comprise the RNA binding protein. In some embodiments, the at least one of RNA-binding protein selectively binds to a target sequence within the RNA molecule. In some embodiments, the at least one RNA-binding protein does not comprise an affinity for a second sequence within the RNA molecule. In some embodiments, the at least one RNA-binding protein does not comprise a high affinity for or selectively bind a second sequence within the RNA molecule. In some embodiments, the at least one RNA-binding protein comprises between 2 and 1300 amino acids, inclusive of the endpoints.

[0630] In some embodiments, the at least one RNA-binding protein of the fusion proteins disclosed herein further comprises a sequence encoding a nuclear localization signal (NLS). In some embodiments, a nuclear localization signal (NLS) is positioned at the N-terminus of the RNA binding protein. In some embodiments, the at least one RNA-binding protein comprises an NLS at a C-terminus of the protein. In some embodiments, the at least one RNA-binding protein further comprises a first sequence encoding a first NLS and a second sequence encoding a second NLS. In some embodiments, the first NLS or the second NLS is positioned at the N-terminus of the RNA-binding protein. In some embodiments, the at least one RNA-binding protein comprises the first NLS or the second NLS at a C-terminus of the protein. In some embodiments, the at least one RNA-binding protein further comprises an NES (nuclear export signal) or other peptide tag or secretory signal.

[0631] In some embodiments, a fusion protein disclosed herein comprises the at least one RNA-binding protein as a first RNA-binding protein together with a second RNA-binding protein comprising or consisting of a nuclease domain.

[0632] In some embodiments, the second RNA-binding polypeptide is operably configured to the first RNA-binding polypeptide at the C-terminus of the first RNA-binding polypeptide. In some embodiments, the second RNA-binding polypeptide is operably configured to the first RNA-binding polypeptide at the N-terminus of the first RNA-binding polypeptide. For example, one such exemplary fusion protein is E99 which is configured so that RNAse1(R39D, N67D, N88A, G89D, R19D, H119N, K41R) is located at the N-terminus of SpyCas9 whereas another exemplary fusion protein, E100, is configured so that RNAse1(R39D, N67D, N88A, G89D, R19D, H119N, K41R) is located at the C-terminus of SpyCas9. In another embodiment, an exemplary fusion protein is a PUF or PUMBY-based first RNA-binding protein fused to a second RNA-binding protein which is an zinc-finger endonuclease known as ZC3H12A of SEQ ID NO: 358 (also termed E17).

### Vectors

[0633] In some embodiments of the compositions and methods of the disclosure, a vector comprises a guide RNA of the disclosure. In some embodiments, the vector comprises at least one guide RNA of the disclosure. In some embodiments, the vector comprises one or more guide RNA(s) of the disclosure. In some embodiments, the vector comprises two or more guide RNAs of the disclosure. In one embodiment, the vector comprises three guide RNAs. In one embodiment, the vector comprises four guide RNAs. In some embodiments, the vector further comprises a guided or non-guided RNA-binding protein of the disclosure. In some embodiments, the vector further comprises a RNA-binding fusion protein of the disclosure. In some embodiments, the fusion protein comprises a first RNA binding protein and a second RNA binding protein. In some embodiments, the RNA-guided RNA-binding systems comprising a RNA-binding protein and a gRNA are in a single vector. In a particular embodiment, the single vector comprises the RNA-guided RNA-binding systems which are Cas13d RNA-guided RNA-binding systems. In one embodiment, the single vector comprises the Cas13dRNA-guided RNA-binding systems which are CasRx RNA-guided RNA-binding systems. In another embodiment, the single vector comprises a non-guided RNA-binding system comprising a PUF or PUMBY-based protein fused with a nuclease domain such as ZC3H12A.

[0634] In some embodiments of the compositions and methods of the disclosure, a first vector comprises a guide RNA of the disclosure and a second vector comprises an RNA-binding protein or RNA-binding fusion protein of the disclosure. In some embodiments, the first vector comprises at least one guide RNA of the disclosure. In some embodiments, the first vector comprises one or more guide RNA(s) of the disclosure. In some embodiments, the first vector comprises two or more guide RNA(s) of the disclosure. In some embodiments, the fusion protein comprises a first RNA binding protein and a second RNA binding protein. In some embodiments, the first vector and the second vector are identical vectors or vector serotypes. In some embodiments, the first vector and the second vector are not identical vectors or vector serotypes.

[0635] In some embodiments of the compositions and methods of the disclosure, the vector is or comprises a component of a “2-component Cas9-based RNA targeting system” comprising (a) nucleic acid sequence encoding an RNA-binding protein or RNA-binding fusion protein and a therapeutic replacement protein of the disclosure; and (b) a single guide RNA (sgRNA) sequence comprising: on its 5′ end, an RNA sequence (or spacer sequence) that hybridizes to or binds to a target RNA sequence (e.g., a pathogenic RNA comprising a target RNA sequence); and on its 3′ end, an RNA sequence (or scaffold sequence) capable of binding to or associating with the CRISPR/Cas9 protein of the fusion protein; and wherein the 2-component RNA targeting system recognizes and alters the target RNA (e.g., comprised within pathogenic target RNA) in a cell in the absence of a PAMmer. In some embodiments, the sequences of the 2-component system are in a single vector. In some embodiments, the spacer sequence of the 2-component system targets RNA comprising one or more gain-or-loss-of-function mutations.

[0636] One type of vector is a “plasmid,” which refers to a circular double stranded DNA loop into which additional DNA segments can be inserted, such as by standard molecular cloning techniques. Another type of vector is a viral vector, wherein virally-derived DNA or RNA sequences are present in the vector for packaging into a virus (e.g., retroviruses, replication defective retroviruses, adenoviruses, replication defective adenoviruses, and adeno-associated viruses). Viral vectors also include polynucleotides carried by a virus for transfection into a host cell. In some embodiments, the vector is a lentivirus (such as an integration-deficient lentiviral vector) or adeno-associated viral (AAV) vector. Vectors are capable of autonomous replication in a host cell into which they are introduced such as e.g., bacterial vectors having a bacterial origin of replication and episomal mammalian vectors and other vectors such as, e.g., non-episomal mammalian vectors, are integrated into the genome of a host cell upon introduction into the host cell, and thereby are replicated along with the host genome.

[0637] In some embodiments, vectors such as e.g., expression vectors, are capable of directing the expression of genes to which they are operatively-linked. Common expression vectors are often in the form of plasmids. In some embodiments, recombinant expression vectors comprise a nucleic acid provided herein such as e.g., a guide RNA which can be expressed from an RNA sequence or a RNA sequence, and a nucleic acid encoding a Cas 13d protein, in a form suitable for expression of the nucleic acid in a host cell. Recombinant expression vectors include one or more regulatory elements, which may be selected on the basis of the host cells to be used for expression, that is operatively-linked to the nucleic acid sequence to be expressed. Within a recombinant expression vector, “operably linked” is intended to mean that the nucleotide sequence of interest is linked to the regulatory element(s) in a manner that allows for expression of the nucleotide sequence such as e.g., in an in vitro transcription/translation system or in a host cell when the vector is introduced into the host cell. Certain embodiments of a vector depend on factors such as the choice of the host cell to be transformed, and the level of expression desired. A vector can be introduced into host cells to thereby produce transcripts, proteins, or peptides, including fusion proteins or peptides, encoded by nucleic acids as described herein such as, e.g., CRISPR transcripts, proteins, enzymes, mutant forms thereof, fusion proteins thereof, etc.

[0638] In some embodiments of the compositions and methods of the disclosure, a vector of the disclosure is a viral vector. In some embodiments, the viral vector comprises a sequence isolated or derived from a retrovirus. In some embodiments, the viral vector comprises a sequence isolated or derived from a lentivirus. In some embodiments, the viral vector comprises a sequence isolated or derived from an adenovirus. In some embodiments, the viral vector comprises a sequence isolated or derived from an adeno-associated virus (AAV). In some embodiments, the viral vector is replication incompetent. In some embodiments, the viral vector is isolated or recombinant. In some embodiments, the viral vector is self-complementary.

[0639] In some embodiments of the compositions and methods of the disclosure, the viral vector comprises a sequence isolated or derived from an adeno-associated virus (AAV). In some embodiments, the viral vector comprises an inverted terminal repeat sequence or a capsid sequence that is isolated or derived from an AAV of serotype AAV1, AAV2, AAV3, AAV4, AAV5, AAV6, AAV7, AAV8, AAV9, AAV10 (AAVrh10), AAV11 or AAV12. In one embodiment, the AAV vector comprises a modified capsid. In one embodiment the AAV vector is an AAV2-Tyr mutant vector. In one embodiment the AAV vector comprises a capsid with a non-tyrosine amino acid at a position that corresponds to a surface-exposed tyrosine residue in position Tyr252, Tyr272, Tyr275, Tyr281, Tyr508, Tyr612, Tyr704, Tyr720, Tyr730 or Tyr673 of wild-type AAV2. See also WO 2008/124724 incorporated herein in its entirety. In some embodiments, the AAV vector comprises an engineered capsid. AAV vectors comprising engineered capsids include without limitation, AAV2.7m8, AAV9.7m8, AAV2 2tYF, and AAV8 Y733F). In some embodiments, the viral vector is replication incompetent. In some embodiments, the viral vector is isolated or recombinant (rAAV). In some embodiments, the viral vector is self-complementary (scAAV).

[0640] In some embodiments of the compositions and methods of the disclosure, a vector of the disclosure is a non-viral vector. In some embodiments, the vector comprises or consists of a nanoparticle, a micelle, a liposome or lipoplex, a polymersome, a polyplex or a dendrimer. In some embodiments, the vector is an expression vector or recombinant expression system. As used herein, the term “recombinant expression system” refers to a genetic construct for the expression of certain genetic material formed by recombination.

[0641] In some embodiments of the compositions and methods of the disclosure, an expression vector, viral vector or non-viral vector provided herein, includes without limitation, an expression control element. An “expression control element” as used herein refers to any sequence that regulates the expression of a coding sequence, such as a gene. Exemplary expression control elements include but are not limited to promoters, enhancers, microRNAs, post-transcriptional regulatory elements, polyadenylation signal sequences, and introns. Expression control elements may be constitutive, inducible, repressible, or tissue-specific, for example. A “promoter” is a control sequence that is a region of a polynucleotide sequence at which initiation and rate of transcription are controlled. It may contain genetic elements at which regulatory proteins and molecules may bind such as RNA polymerase and other transcription factors. In some embodiments, expression control by a promoter is tissue-specific. In some embodiments, expression control by a promoter is constituitive or ubiquitous. Non-limiting exemplary promoters include a pol III promoter such as, e.g., U6 and H1 promoters and/or a pol II promoter e.g., SV40, CMV (optionally including the CMV enhancer), RSV (Rous Sarcoma Virus LTR promoter (optionally including RSV enhancer), CBA (hybrid CMV enhancer/chicken β-actin), CAG (hybrid CMV enhancer fused to chicken β-actin), truncated CAG, Cbh (hybrid CBA), EF-1a (human longation factor alpha-1) or EFS (short intron-less EF-1 alphs), PGK (phosphoglycerol kinase), CEF (chicken embryo fibroblasts), UBC (ubiquitinC), GUSB (lysosomal enzyme beta-glucuronidase), UCOE (ubiquitous chromatin opening element), hAAT (alpha-1 antitrypsin), TBG (thyroxine binding globulin), Desmin, MCK (muscle creatine kinase), C5-12 (synthetic muscle promoter), NSE (neuron-specific enolase), Synapsin, Synapsin-1 (SYN-1), opsin, PDGF (platelet-derived growth factor), PDGF-A, MecP2 (methyl CpG-binding protein 2), CaMKII (Calcium/Calmodulin-dependent protein kinase II), mGuR2 (metabotropic glutamate receptor 2), NFL (neurofilament light), NFH (neurofilament heavy), nP2, PPE (rat preproenkephalin), ENK (preproenkephalin), Preproenkephalin-neurofilament chimeric promoter, EAAT2 (glutamate transporter), GFAP (glial fibrillary acidic protein), MBP (myelin basic protein), human rhodopsin kinase promoter (hGRK), β-actin promoter, dihydrofolate reductase promoter, and combinations thereof. An “enhancer” is a region of DNA that can be bound by activating proteins to increase the likelihood or frequency of transcription. Non-limiting exemplary enhancers and posttranscriptional regulatory elements include the CMV enhancer, MCK enhancer, R-U5′ segment in LTR of HTLV-1, SV40 enhancer, the intron sequence between exons 2 and 3 of rabbit β-globin, and WPRE.

[0642] In some embodiments of the compositions and methods of the disclosure, an expression vector, viral vector or non-viral vector provided herein, includes without limitation, vector elements such as an IRES or 2A peptide sites for configuration of “multicistronic” or “polycistronic” or “bicistronic” or tricistronic” constructs, i.e., having double or triple or multiple coding areas or exons, and as such will have the capability to express from mRNA two or more proteins from a single construct. Multicistronic vectors simultaneously express two or more separate proteins from the same mRNA. The two strategies most widely used for constructing multicistronic configurations are through the use of an IRES or a 2A self-cleaving site. An “IRES” refers to an internal ribosome entry site or portion thereof of viral, prokaryotic, or eukaryotic origin which are used within polycistronic vector constructs. In some embodiments, an IRES is an RNA element that allows for translation initiation in a cap-independent manner. The term “self-cleaving peptides” or “sequences encoding self-cleaving peptides” or “2A self-cleaving site” refer to linking sequences which are used within vector constructs to incorporate sites to promote ribosomal skipping and thus to generate two polypeptides from a single promoter, such self-cleaving peptides include without limitation, T2A, and P2A peptides or sequences encoding the self-cleaving peptides.

[0643] In one embodiment, the vector configuration is shown in e.g., FIGS. 1, 2 or 6. In another embodiment, the vector configuration comprises a promoter or regulatory sequence driving the expression of the nucleic acid encoding the RNA-binding protein in operable linkage with a promoter or regulatory sequence driving the expression of the replacement gene. In another embodiment, a vector configuration comprises an promoter such as a rhodopsin kinase promoter driving expression of the nucleic acid encoding the PUF or PUMBY fusion protein in operable linkage with a promoter such as an opsin promoter driving expression of a nucleic acid sequence encoding the replacement or “hardened” rhodopsin protein. In another embodiment, a vector configuration comprises an promoter such as an opsin promoter driving expression of the nucleic acid encoding the PUF or PUMBY fusion protein in operable linkage with a promoter such as an rhodopsin kinase promoter driving expression of a nucleic acid sequence encoding the replacement or “hardened” rhodopsin protein. In another embodiment, the nucleic acid encoding the RNA-binding protein operably linked to the nucleic acid encoding the replacement protein via an IRES or a 2A peptide.

[0644] In some embodiments, the vector is a viral vector. In some embodiments, the vector is an adenoviral vector, an adeno-associated viral (AAV) vector, or a lentiviral vector. In some embodiments, the vector is a retroviral vector, an adenoviral/retroviral chimera vector, a herpes simplex viral I or II vector, a parvoviral vector, a reticuloendotheliosis viral vector, a polioviral vector, a papillomaviral vector, a vaccinia viral vector, or any hybrid or chimeric vector incorporating favorable aspects of two or more viral vectors. In some embodiments, the vector further comprises one or more expression control elements operably linked to the polynucleotide. In some embodiments, the vector further comprises one or more selectable markers. In some embodiments, the AAV vector has low toxicity. In some embodiments, the AAV vector does not incorporate into the host genome, thereby having a low probability of causing insertional mutagenesis. In some embodiments, the AAV vector can encode a range of total polynucleotides from 4.5 kb to 4.75 kb. In some embodiments, exemplary AAV vectors that may be used in any of the herein described compositions, systems, methods, and kits can include an AAV1 vector, a modified AAV1 vector, an AAV2 vector, a modified AAV2 vector, an AAV2-Tyr mutant vector, an AAV3 vector, a modified AAV3 vector, an AAV4 vector, a modified AAV4 vector, an AAV5 vector, a modified AAV5 vector, an AAV6 vector, a modified AAV6 vector, an AAV7 vector, a modified AAV7 vector, an AAV8 vector, an AAV9 vector, an AAV.rh10 vector, a modified AAV.rh10 vector, an AAV.rh32/33 vector, a modified AAV.rh32/33 vector, an AAV.rh43 vector, a modified AAV.rh43 vector, an AAV.rh64R1 vector, and a modified AAV.rh64R1 vector, an AAV-Tyr mutant vector, and any combinations or equivalents thereof. In some embodiments, the lentiviral vector is an integrase-competent lentiviral vector (ICLV). In some embodiments, the lentiviral vector can refer to the transgene plasmid vector as well as the transgene plasmid vector in conjunction with related plasmids (e.g., a packaging plasmid, a rev expressing plasmid, an envelope plasmid) as well as a lentiviral-based particle capable of introducing exogenous nucleic acid into a cell through a viral or viral-like entry mechanism. Lentiviral vectors are well-known in the art (see, e.g., Trono D. (2002) Lentiviral vectors, New York: Spring-Verlag Berlin Heidelberg and Durand et al. (2011) Viruses 3(2):132-159 doi: 10.3390/v3020132). In some embodiments, exemplary lentiviral vectors that may be used in any of the herein described compositions, systems, methods, and kits can include a human immunodeficiency virus (HIV) 1 vector, a modified human immunodeficiency virus (HIV) 1 vector, a human immunodeficiency virus (HIV) 2 vector, a modified human immunodeficiency virus (HIV) 2 vector, a sooty mangabey simian immunodeficiency virus (SIV_{SM}) vector, a modified sooty mangabey simian immunodeficiency virus (SIV_{SM}) vector, a African green monkey simian immunodeficiency virus (SIV_{AGM}) vector, a modified African green monkey simian immunodeficiency virus (SIV_{AGM}) vector, an equine infectious anemia virus (EIAV) vector, a modified equine infectious anemia virus (EIAV) vector, a feline immunodeficiency virus (FIV) vector, a modified feline immunodeficiency virus (FIV) vector, a Visna/maedi virus (VNV/VMV) vector, a modified Visna/maedi virus (VNV/VMV) vector, a caprine arthritis-encephalitis virus (CAEV) vector, a modified caprine arthritis-encephalitis virus (CAEV) vector, a bovine immunodeficiency virus (BIV), or a modified bovine immunodeficiency virus (BIV).

### Nucleic Acids

[0645] Provided herein are the nucleic acid sequences encoding the knockdown and replacement therapeutics disclosed herein for use in gene transfer and expression techniques described herein. It should be understood, although not always explicitly stated that the sequences provided herein can be used to provide the expression product as well as substantially identical sequences that produce a protein that has the same biological properties. These “biologically equivalent” or “biologically active” or “equivalent” polypeptides are encoded by equivalent polynucleotides as described herein. They may possess at least 60%, or alternatively, at least 65%, or alternatively, at least 70%, or alternatively, at least 75%, or alternatively, at least 80%, or alternatively at least 85%, or alternatively at least 90%, or alternatively at least 95% or alternatively at least 98%, identical primary amino acid sequence to the reference polypeptide when compared using sequence identity methods run under default conditions. Specific polypeptide sequences are provided as examples of particular embodiments. Modifications to the sequences to amino acids with alternate amino acids that have similar charge. Additionally, an equivalent polynucleotide is one that hybridizes under stringent conditions to the reference polynucleotide or its complement or in reference to a polypeptide, a polypeptide encoded by a polynucleotide that hybridizes to the reference encoding polynucleotide under stringent conditions or its complementary strand. Alternatively, an equivalent polypeptide or protein is one that is expressed from an equivalent polynucleotide.

[0646] The nucleic acid sequences (e.g., polynucleotide sequences) disclosed herein may be codon-optimized which is a technique well known in the art. In some embodiments disclosed herein, exemplary Cas sequences, such as e.g., a nucleic acid sequence encoding SEQ ID NO: 92 (Cas13d known as CasRx) or the nucleic acid sequence encoding SEQ ID NO: 298 (Cas13d known as CasRx), are codon optimized for expression in human cells. Codon optimization refers to the fact that different cells differ in their usage of particular codons. This codon bias corresponds to a bias in the relative abundance of particular tRNAs in the cell type. By altering the codons in the sequence to match with the relative abundance of corresponding tRNAs, it is possible to increase expression. It is also possible to decrease expression by deliberately choosing codons for which the corresponding tRNAs are known to be rare in a particular cell type. Codon usage tables are known in the art for mammalian cells, as well as for a variety of other organisms. Based on the genetic code, nucleic acid sequences coding for, e.g., a Cas protein, can be generated. In some embodiments, such a sequence is optimized for expression in a host or target cell, such as a host cell used to express the Cas protein or a cell in which the disclosed methods are practiced (such as in a mammalian cell, e.g., a human cell). Codon preferences and codon usage tables for a particular species can be used to engineer isolated nucleic acid molecules encoding a Cas protein (such as one encoding a protein having at least 80%, at least 85%, at least 90%, at least 92%, at least 95%, at least 96%, at least 97%, at least 98%, at least 99%, or 100% sequence identity to its corresponding wild-type protein) that takes advantage of the codon usage preferences of that particular species. For example, the Cas proteins disclosed herein can be designed to have codons that are preferentially used by a particular organism of interest. In one example, an Cas nucleic acid sequence is optimized for expression in human cells, such as one having at least 70%, at least 80%, at least 85%, at least 90%, at least 92%, at least 95%, at least 98%, or at least 99% sequence identity to its corresponding wild-type or originating nucleic acid sequence. In some embodiments, an isolated nucleic acid molecule encoding at least one Cas protein (which can be part of a vector) includes at least one Cas protein coding sequence that is codon optimized for expression in a eukaryotic cell, or at least one Cas protein coding sequence codon optimized for expression in a human cell. In one embodiment, such a codon optimized Cas coding sequence has at least 80%, at least 85%, at least 90%, at least 92%, at least 95%, at least 96%, at least 97%, at least 98%, at least 99%, or 100% sequence identity to its corresponding wild-type or originating sequence. In another embodiment, a eukaryotic cell codon optimized nucleic acid sequence encodes a Cas protein having at least 85%, at least 90%, at least 92%, at least 95%, at least 96%, at least 97%, at least 98%, at least 99%, or 100% sequence identity to its corresponding wild-type or originating protein. In another embodiment, a variety of clones containing functionally equivalent nucleic acids may be routinely generated, such as nucleic acids which differ in sequence but which encode the same Cas protein sequence. Silent mutations in the coding sequence result from the degeneracy (i.e., redundancy) of the genetic code, whereby more than one codon can encode the same amino acid residue. Thus, for example, leucine can be encoded by CTT, CTC, CTA, CTG, TTA, or TTG; serine can be encoded by TCT, TCC, TCA, TCG, AGT, or AGC; asparagine can be encoded by AAT or AAC; aspartic acid can be encoded by GAT or GAC; cysteine can be encoded by TGT or TGC; alanine can be encoded by GCT, GCC, GCA, or GCG; glutamine can be encoded by CAA or CAG; tyrosine can be encoded by TAT or TAC; and isoleucine can be encoded by ATT, ATC, or ATA. Tables showing the standard genetic code can be found in various sources (see, for example, Stryer, 1988, Biochemistry, 3.sup.rd Edition, W.H. 5 Freeman and Co., NY).

[0647] “Hybridization” refers to a reaction in which one or more polynucleotides react to form a complex that is stabilized via hydrogen bonding between the bases of the nucleotide residues. The hydrogen bonding may occur by Watson-Crick base pairing, Hoogstein binding, or in any other sequence-specific manner. The complex may comprise two strands forming a duplex structure, three or more strands forming a multi-stranded complex, a single self-hybridizing strand, or any combination of these. A hybridization reaction may constitute a step in a more extensive process, such as the initiation of a PC reaction, or the enzymatic cleavage of a polynucleotide by a ribozyme.

[0648] Examples of stringent hybridization conditions include: incubation temperatures of about 25° C. to about 37° C.; hybridization buffer concentrations of about 6×SSC to about 10×SSC; formamide concentrations of about 0% to about 25%; and wash solutions from about 4×SSC to about 8×SSC. Examples of moderate hybridization conditions include: incubation temperatures of about 40° C. to about 50° C.; buffer concentrations of about 9×SSC to about 2×SSC; formamide concentrations of about 30% to about 50%; and wash solutions of about 5×SSC to about 2×SSC. Examples of high stringency conditions include: incubation temperatures of about 55° C. to about 68° C.; buffer concentrations of about 1×SSC to about 0.1×SSC; formamide concentrations of about 55% to about 75%; and wash solutions of about 1×SSC, 0.1×SSC, or deionized water. In general, hybridization incubation times are from 5 minutes to 24 hours, with 1, 2, or more washing steps, and wash incubation times are about 1, 2, or 15 minutes. SSC is 0.15 M NaCl and 15 mM citrate buffer. It is understood that equivalents of SSC using other buffer systems can be employed.

[0649] “Homology” or “identity” or “similarity” refers to sequence similarity between two peptides or between two nucleic acid molecules. Homology can be determined by comparing a position in each sequence which may be aligned for purposes of comparison. When a position in the compared sequence is occupied by the same base or amino acid, then the molecules are homologous at that position. A degree of homology between sequences is a function of the number of matching or homologous positions shared by the sequences. An “unrelated” or “non-homologous” sequence shares less than 40% identity, or alternatively less than 25% identity, with one of the sequences of the present invention.

### Cells

[0650] In some embodiments of the compositions and methods of the disclosure, a cell of the disclosure is a prokaryotic cell.

[0651] In some embodiments of the compositions and methods of the disclosure, a cell of the disclosure is a eukaryotic cell. In some embodiments, the cell is a mammalian cell. In some embodiments, the cell is a bovine, murine, feline, equine, porcine, canine, simian, or human cell. In some embodiments, the cell is a non-human mammalian cell such as a non-human primate cell.

[0652] In some embodiments, a cell of the disclosure is a somatic cell. In some embodiments, a cell of the disclosure is a germline cell. In some embodiments, a germline cell of the disclosure is not a human cell.

[0653] In some embodiments of the compositions and methods of the disclosure, a cell of the disclosure is a stem cell. In some embodiments, a cell of the disclosure is an embryonic stem cell. In some embodiments, an embryonic stem cell of the disclosure is not a human cell. In some embodiments, a cell of the disclosure is a multipotent stem cell or a pluripotent stem cell. In some embodiments, a cell of the disclosure is an adult stem cell. In some embodiments, a cell of the disclosure is an induced pluripotent stem cell (iPSC). In some embodiments, a cell of the disclosure is a hematopoietic stem cell (HSC).

[0654] In some embodiments of the disclosure, a somatic cell is an ocular cell. An ocular cell includes, without limitation, corneal epithelial cells, keratyocytes, retinal pigment epithelial (RPE) cells, lens epithelial cells, iris pigment epithelial cells, conjunctival fibroblasts, non-pigmented ciliary epithelial cells, trabecular meshwork cells, ocular choroid fibroblasts, conjunctival epithelial cells, In some embodiments, an ocular cell is a retinal cell or a corneal cell. In one embodiment, a retinal cell is a photoreceptor cell or a retinal pigment epithelial cell. In another embodiment, a retinal cell is a ganglion cell, an amacrine cell, a bipolar cell, a horizontal cell, a Müller glial cell, a rod cell, or a cone cell.

[0655] In some embodiments of the compositions and methods of the disclosure, a somatic cell of the disclosure is an immune cell. In some embodiments, an immune cell of the disclosure is a lymphocyte. In some embodiments, an immune cell of the disclosure is a T lymphocyte (also referred to herein as a T-cell). Exemplary T-cells of the disclosure include, but are not limited to, naïve T cells, effector T cells, helper T cells, memory T cells, regulatory T cells (Tregs) and Gamma delta T cells. In some embodiments, an immune cell of the disclosure is a B lymphocyte. In some embodiments, an immune cell of the disclosure is a natural killer cell. In some embodiments, an immune cell of the disclosure is an antigen-presenting cell.

[0656] In some embodiments of the compositions and methods of the disclosure, a somatic cell of the disclosure is a muscle cell. In some embodiments, a muscle cell of the disclosure is a myoblast or a myocyte. In some embodiments, a muscle cell of the disclosure is a cardiac muscle cell, skeletal muscle cell or smooth muscle cell. In some embodiments, a muscle cell of the disclosure is a striated cell.

[0657] In some embodiments of the compositions and methods of the disclosure, a somatic cell of the disclosure is an epithelial cell. In some embodiments, an epithelial cell of the disclosure forms a squamous cell epithelium, a cuboidal cell epithelium, a columnar cell epithelium, a stratified cell epithelium, a pseudostratified columnar cell epithelium or a transitional cell epithelium. In some embodiments, an epithelial cell of the disclosure forms a gland including, but not limited to, a pineal gland, a thymus gland, a pituitary gland, a thyroid gland, an adrenal gland, an apocrine gland, a holocrine gland, a merocrine gland, a serous gland, a mucous gland and a sebaceous gland. In some embodiments, an epithelial cell of the disclosure contacts an outer surface of an organ including, but not limited to, a lung, a spleen, a stomach, a pancreas, a bladder, an intestine, a kidney, a gallbladder, a liver, a larynx or a pharynx. In some embodiments, an epithelial cell of the disclosure contacts an outer surface of a blood vessel or a vein.

[0658] In some embodiments of the compositions and methods of the disclosure, a somatic cell of the disclosure is a neuronal cell. In some embodiments, a neuron cell of the disclosure is a neuron of the central nervous system. In some embodiments, a neuron cell of the disclosure is a neuron of the brain or the spinal cord. In some embodiments, a neuron cell of the disclosure is a neuron of the retina. In some embodiments, a neuron cell of the disclosure is a neuron of a cranial nerve or an optic nerve. In some embodiments, a neuron cell of the disclosure is a neuron of the peripheral nervous system. In some embodiments, a neuron cell of the disclosure is a neuroglial or a glial cell. In some embodiments, a glial of the disclosure is a glial cell of the central nervous system including, but not limited to, oligodendrocytes, astrocytes, ependymal cells, and microglia. In some embodiments, a glial of the disclosure is a glial cell of the peripheral nervous system including, but not limited to, Schwann cells and satellite cells.

[0659] In some embodiments of the compositions and methods of the disclosure, a somatic cell of the disclosure is a primary cell.

[0660] In some embodiments of the compositions and methods of the disclosure, a somatic cell of the disclosure is a cultured cell.

[0661] In some embodiments of the compositions and methods of the disclosure, a somatic cell of the disclosure is in vivo, in vitro, ex vivo or in situ.

[0662] In some embodiments of the compositions and methods of the disclosure, a somatic cell of the disclosure is autologous or allogeneic.

### Methods of Use

[0663] The disclosure provides a method of modifying level of expression of an RNA molecule of the disclosure or a protein encoded by the RNA molecule comprising contacting the composition of the disclosure and the RNA molecule under conditions suitable for binding of one or more of the guide RNA or the RNA-binding protein or RNA-binding fusion protein (or a portion thereof) to the RNA molecule.

[0664] The disclosure provides a method of modifying an activity of a protein encoded by an RNA molecule comprising contacting the composition of the disclosure and the RNA molecule under conditions suitable for binding of one or more of the guide RNA or the RNA-binding protein or the fusion protein (or a portion thereof) to the RNA molecule.

[0665] The disclosure provides a method of modifying level of expression of an RNA molecule of the disclosure or a protein encoded by the RNA molecule comprising contacting the composition of the disclosure and a cell comprising the RNA molecule under conditions suitable for binding of one or more of the guide RNA or the RNA-binding protein or fusion protein (or a portion thereof) to the RNA molecule. In some embodiments, the cell is in vivo, in vitro, ex vivo or in situ. In some embodiments, the composition of the disclosure comprises a vector comprising a guide RNA of the disclosure and an RNA-binding protein or fusion protein of the disclosure and the therapeutic replacement protein of the disclosure. In some embodiments, the vector is an AAV.

[0666] The disclosure provides a method of modifying an activity of a protein encoded by an RNA molecule comprising contacting the composition of the disclosure and a cell comprising the RNA molecule under conditions suitable for binding of one or more of the guide RNA or the RNA-binding protein or fusion protein (or a portion thereof) to the RNA molecule. In some embodiments, the cell is in vivo, in vitro, ex vivo or in situ. In some embodiments, the composition of the disclosure comprises a vector comprising a guide RNA or a single guide RNA sequence of the disclosure and a nucleic acid sequence encoding the RNA-binding protein or fusion protein of the disclosure and the therapeutic replacement protein of the disclosure. In some embodiments, the vector is an AAV.

[0667] The disclosure provides a method of modifying the level of expression of an RNA molecule of the disclosure or a protein encoded by the RNA molecule comprising contacting the composition of the disclosure and the RNA molecule under conditions suitable for RNA nuclease activity wherein the RNA-binding protein or fusion protein induces a break in the RNA molecule.

[0668] The disclosure provides a method of modifying an activity of a protein encoded by an RNA molecule comprising contacting the composition of the disclosure and the RNA molecule under conditions suitable for RNA nuclease activity wherein the RNA-binding protein or fusion protein induces a break in the RNA molecule.

[0669] The disclosure provides a method of modifying a level of expression of an RNA molecule of the disclosure or a protein encoded by the RNA molecule comprising contacting the composition of the disclosure and a cell comprising the RNA molecule under conditions suitable for RNA nuclease activity wherein the RNA-binding protein or fusion protein induces a break in the RNA molecule. In some embodiments, the composition of the disclosure additionally provides a replacement therapeutic protein which corresponds to a pathogenic RNA comprising a target RNA. In some embodiments, the cell is in vivo, in vitro, ex vivo or in situ. In some embodiments, the composition comprises a vector comprising composition comprising a guide RNA of the disclosure, an RNA-binding fusion protein of the disclosure, and a therapeutic replacement protein of the disclosure. In some embodiments, the vector is an AAV.

[0670] The disclosure provides a method of modifying an activity of a protein encoded by an RNA molecule comprising contacting the composition and a cell comprising the RNA molecule under conditions suitable for RNA nuclease activity wherein the RNA-binding protein or fusion protein induces a break in the RNA molecule. In some embodiments, the cell is in vivo, in vitro, ex vivo or in situ. In some embodiments, the composition comprises a vector comprising composition comprising a guide RNA or a single guide RNA of the disclosure and a nucleic acid sequence encoding an RNA-binding protein or fusion protein of the disclosure and a therapeutic replacement protein. In some embodiments, the vector is an AAV.

[0671] The disclosure provides a method of treating a disease or disorder comprising administering to a subject a therapeutically effective amount of a composition of the disclosure.

[0672] The disclosure provides a method of treating a disease or disorder comprising administering to a subject a therapeutically effective amount of a composition of the disclosure, wherein the composition comprises a vector comprising composition comprising a guide RNA of the disclosure and a nucleic acid sequence encoding an RNA-binding protein or fusion protein of the disclosure and a therapeutic replacement protein of the disclosure, wherein the composition modifies, reduces or ablates a level of expression of a pathogenic target RNA of an RNA molecule of the disclosure or a protein encoded by the RNA molecule (compared to the level of expression of a corresponding wild-type protein), and wherein the therapeutic protein replaces gain-or-loss-of-function mutations encoded by the pathogenic RNA.

[0673] The disclosure provides a method of treating a disease or disorder comprising administering to a subject a therapeutically effective amount of a composition of the disclosure, wherein the composition comprises a vector comprising composition comprising a guide RNA of the disclosure and a nucleic acid sequence encoding an RNA-binding protein or fusion protein of the disclosure and a therapeutic replacement protein of the disclosure, wherein the composition modifies, reduces or ablates a level of expression of a pathogenic target RNA of an RNA molecule of the disclosure or a protein encoded by the RNA molecule (compared to the level of expression of a corresponding wild-type protein), and wherein the therapeutic protein replaces gain-or-loss-of-function mutations encoded by the pathogenic RNA.

[0674] In some embodiments of the compositions and methods of the disclosure, a disease or disorder includes, without limitation, a disease or disorder related to rhodopsin expression or lack thereof. In some embodiments, the disease or disorder is a retinal degenerative disorder or retinopathy. In some embodiments, the retinal degenerative disorder is retinitis pigmentosa.

[0675] Retinitis pigmentosa is an autosomal dominant disorder caused by gain-or-loss-of-function mutations in the rhodopsin gene. Loss of rod photoreceptor cells which express rhodopsin leads to loss of cone photoreceptor cells which causes a degenerative loss of vision. Mutations in the human rhodopsin gene affect the protein's folding, trafficking and activity which most often triggers retinal degeneration in afflicted patients. A single base-substitution at codon position 23 in the human opsin gene (P23H) is also a common cause of retinitis pigmentosa. Retinitis pigmentosa is one of the most common forms of inherited retinal degeneration with a prevalence of 1 in 4000. The disease is the result of varying inheritance patterns (autosomal dominant, autosomal recessive, and X-linked) depending on the mutated gene.

[0676] In some embodiments of the compositions and methods of the disclosure, a disease or disorder of the disclosure includes, but is not limited to, a genetic disease or disorder. In some embodiments, the genetic disease or disorder is a single-gene disease or disorder. In some embodiments, the single-gene disease or disorder is an autosomal dominant disease or disorder, an autosomal recessive disease or disorder, an X-chromosome linked (X-linked) disease or disorder, an X-linked dominant disease or disorder, an X-linked recessive disease or disorder, a Y-linked disease or disorder or a mitochondrial disease or disorder. In some embodiments, the genetic disease or disorder is a multiple-gene disease or disorder. In some embodiments, the genetic disease or disorder is a multiple-gene disease or disorder. In some embodiments, the single-gene disease or disorder is an autosomal dominant disease or disorder including, but not limited to, Huntington's disease, neurofibromatosis type 1, neurofibromatosis type 2, Marfan syndrome, hereditary nonpolyposis colorectal cancer, hereditary multiple exostoses, Von Willebrand disease, and acute intermittent porphyria. In some embodiments, the single-gene disease or disorder is an autosomal recessive disease or disorder including, but not limited to, Albinism, Medium-chain acyl-CoA dehydrogenase deficiency, cystic fibrosis, sickle-cell disease, Tay-Sachs disease, Niemann-Pick disease, spinal muscular atrophy, and Roberts syndrome. In some embodiments, the single-gene disease or disorder is X-linked disease or disorder including, but not limited to, muscular dystrophy, Duchenne muscular dystrophy, Hemophilia, Adrenoleukodystrophy (ALD), Rett syndrome, and Hemophilia A. In some embodiments, the single-gene disease or disorder is a mitochondrial disorder including, but not limited to, Leber's hereditary optic neuropathy.

[0677] In some embodiments of the compositions and methods of the disclosure, a disease or disorder of the disclosure includes, but is not limited to, an immune disease or disorder. In some embodiments, the immune disease or disorder is an immunodeficiency disease or disorder including, but not limited to, B-cell deficiency, T-cell deficiency, neutropenia, asplenia, complement deficiency, acquired immunodeficiency syndrome (AIDS) and immunodeficiency due to medical intervention (immunosuppression as an intended or adverse effect of a medical therapy). In some embodiments, the immune disease or disorder is an autoimmune disease or disorder including, but not limited to, Achalasia, Addison's disease, Adult Still's disease, Agammaglobulinemia, Alopecia areata, Amyloidosis, Anti-GBM/Anti-TBM nephritis, Antiphospholipid syndrome, Autoimmune angioedema, Autoimmune dysautonomia, Autoimmune encephalomyelitis, Autoimmune hepatitis, Autoimmune inner ear disease (AIED), Autoimmune myocarditis, Autoimmune oophoritis, Autoimmune orchitis, Autoimmune pancreatitis, Autoimmune retinopathy, Autoimmune urticaria, Axonal & neuronal neuropathy (AMAN), Baló disease, Behcet's disease, Benign mucosal pemphigoid, Bullous pemphigoid, Castleman disease (CD), Celiac disease, Chagas disease, Chronic inflammatory demyelinating polyneuropathy (CIDP), Chronic recurrent multifocal osteomyelitis (CRMO), Churg-Strauss Syndrome (CSS) or Eosinophilic Granulomatosis (EGPA), Cicatricial pemphigoid, Cogan's syndrome, Cold agglutinin disease, Congenital heart block, Coxsackie myocarditis, CREST syndrome, Crohn's disease, Dermatitis herpetiformis, Dermatomyositis, Devic's disease (neuromyelitis optica), Discoid lupus, Dressler's syndrome, Endometriosis, Eosinophilic esophagitis (EoE), Eosinophilic fasciitis, Erythema nodosum, Essential mixed cryoglobulinemia, Evans syndrome, Fibromyalgia, Fibrosing alveolitis, Giant cell arteritis (temporal arteritis), Giant cell myocarditis, Glomerulonephritis, Goodpasture's syndrome, Granulomatosis with Polyangiitis, Graves' disease, Guillain-Barre syndrome, Hashimoto's thyroiditis, Hemolytic anemia, Henoch-Schonlein purpura (HSP), Herpes gestationis or pemphigoid gestationis (PG), Hidradenitis Suppurativa (HS) (Acne Inversa), Hypogammalglobulinemia, IgA Nephropathy, IgG4-related sclerosing disease, Immune thrombocytopenic purpura (ITP), Inclusion body myositis (IBM), Interstitial cystitis (IC), Juvenile arthritis, Juvenile diabetes (Type 1 diabetes), Juvenile myositis (JM), Kawasaki disease, Lambert-Eaton syndrome, Leukocytoclastic vasculitis, Lichen planus, Lichen sclerosus, Ligneous conjunctivitis, Linear IgA disease (LAD), Lupus, Lyme disease chronic, Meniere's disease, Microscopic polyangiitis (MPA), Mixed connective tissue disease (MCTD), Mooren's ulcer, Mucha-Habermann disease, Multifocal Motor Neuropathy (MMN) or MMNCB, Multiple sclerosis, Myasthenia gravis, Myositis, Narcolepsy, Neonatal Lupus, Neuromyelitis optica, Neutropenia, Ocular cicatricial pemphigoid, Optic neuritis, Palindromic rheumatism (PR), PANDAS, Paraneoplastic cerebellar degeneration (PCD), Paroxysmal nocturnal hemoglobinuria (PNH), Parry Romberg syndrome, Pars planitis (peripheral uveitis), Parsonnage-Turner syndrome, Pemphigus, Peripheral neuropathy, Perivenous encephalomyelitis, Pernicious anemia (PA), POEMS syndrome, Polyarteritis nodosa, Polyglandular syndromes type I, II, III, Polymyalgia rheumatica, Polymyositis, Postmyocardial infarction syndrome, Postpericardiotomy syndrome, Primary biliary cirrhosis, Primary sclerosing cholangitis, Progesterone dermatitis, Psoriasis, Psoriatic arthritis, Pure red cell aplasia (PRCA), Pyoderma gangrenosum, Raynaud's phenomenon, Reactive Arthritis, Reflex sympathetic dystrophy, Relapsing polychondritis, Restless legs syndrome (RLS), Retroperitoneal fibrosis, Rheumatic fever, Rheumatoid arthritis, Sarcoidosis, Schmidt syndrome, Scleritis, Scleroderma, Sjögren's syndrome, Sperm & testicular autoimmunity, Stiff person syndrome (SPS), Subacute bacterial endocarditis (SBE), Susac's syndrome, Sympathetic ophthalmia (SO), Takayasu's arteritis, Temporal arteritis/Giant cell arteritis, Thrombocytopenic purpura (TTP), Tolosa-Hunt syndrome (THS), Transverse myelitis, Type 1 diabetes, Ulcerative colitis (UC), Undifferentiated connective tissue disease (UCTD), Uveitis, Vasculitis, Vitiligo, Vogt-Koyanagi-Harada Disease, AAT (alpha 1 anti-trypsin deficiency), Wegener's granulomatosis, Wilson disease, Hereditary Hemochromatosis Types 1-5, Type I tyrosinemia, Argininosuccinate Lyase Deficiency, Glycogen storage disease type I-VIII, Citrin deficiency, Cholesteryl ester storage disease, progressive familial intrahepatic cholestasis type 3, polycystic kidney disease, Alstrom syndrome, and Congenital hepatic fibrosis.

[0678] In some embodiments of the compositions and methods of the disclosure, a disease or disorder of the disclosure includes, but is not limited to, an inflammatory disease or disorder.

[0679] In some embodiments of the compositions and methods of the disclosure, a disease or disorder of the disclosure includes, but is not limited to, a metabolic disease or disorder. In some embodiments, the metabolic disease or disorder is related to inborn errors of the metabolism. In some embodiments, the metabolic disease or disorder related to inborn errors of the metabolism include, without limitation, disorders of amino acid metabolism, disorders of carbohydrate metabolism, disorder or defects of urea cycle, disorders of organic acid metabolism (e.g., organic acidurias), disorders of fatty acid oxidation and mitochondrial metabolism, disorders of porphyrin metabolism, disorders of purine or pyrimidine metabolism, disorders of steroid metabolism, disorders of peroxisomal function, lysosomal storage disorders, and cholestatic diseases.

[0680] In some embodiments of the compositions and methods of the disclosure, a disease or disorder of the disclosure includes, but is not limited to, mitochondrial diseases. In some embodiments, the mitochondrial disease includes, but is not limited to, Leber's hereditary optic neuropathy (LHON), Leigh's disease or syndrome, Neuropathy, Ataxia, and Retinitis Pigmentosa (NARP), Kearns-Sayre syndrome (KSS), Pearson syndrome, Chronic Progressive External Opthalmoplegia (CPEO), Mitochondrial neurogastrointestinal encephalopathy syndrome (MNGIE), Mitochondrial Encephalomyopathy Lactic Acidosis and Strokelike Episodes (MELAS), and Mitochondrial Enoyl CoA Reductase Protein Associated Neurodegeneration (MEPAN).

[0681] In some embodiments of the compositions and methods of the disclosure, a disease or disorder of the disclosure includes, but is not limited to, a degenerative or a progressive disease or disorder. In some embodiments, the degenerative or a progressive disease or disorder includes, but is not limited to, amyotrophic lateral sclerosis (ALS), Huntington's disease, Alzheimer's disease, and aging.

[0682] In some embodiments of the compositions and methods of the disclosure, a disease or disorder of the disclosure includes, but is not limited to, an infectious disease or disorder.

[0683] In some embodiments of the compositions and methods of the disclosure, a disease or disorder of the disclosure includes, but is not limited to, a pediatric or a developmental disease or disorder.

[0684] In some embodiments of the compositions and methods of the disclosure, a disease or disorder of the disclosure includes, but is not limited to, a cardiovascular disease or disorder.

[0685] In some embodiments of the compositions and methods of the disclosure, a disease or disorder of the disclosure includes, but is not limited to, a proliferative disease or disorder. In some embodiments, the proliferative disease or disorder is a cancer. In some embodiments, the cancer includes, but is not limited to, Acute Lymphoblastic Leukemia (ALL), Acute Myeloid Leukemia (AML), Adrenocortical Carcinoma, AIDS-Related Cancers, Kaposi Sarcoma (Soft Tissue Sarcoma), AIDS-Related Lymphoma (Lymphoma), Primary CNS Lymphoma (Lymphoma), Anal Cancer, Appendix Cancer, Gastrointestinal Carcinoid Tumors, Astrocytomas, Atypical Teratoid/Rhabdoid Tumor, Central Nervous System (Brain Cancer), Basal Cell Carcinoma, Bile Duct Cancer, Bladder Cancer, Bone Cancer, Ewing Sarcoma, Osteosarcoma, Malignant Fibrous Histiocytoma, Brain Tumors, Breast Cancer, Burkitt Lymphoma, Carcinoid Tumor, Carcinoma, Cardiac (Heart) Tumors, Embryonal Tumors, Germ Cell Tumor, Primary CNS Lymphoma, Cervical Cancer, Cholangiocarcinoma, Chordoma, Chronic Lymphocytic Leukemia (CLL), Chronic Myelogenous Leukemia (CML), Chronic Myeloproliferative Neoplasms, Colorectal Cancer, Craniopharyngioma, Cutaneous T-Cell Lymphoma, Ductal Carcinoma In Situ, Embryonal Tumors, Endometrial Cancer (Uterine Cancer), Ependymoma, Esophageal Cancer, Esthesioneuroblastoma (Head and Neck Cancer), Ewing Sarcoma (Bone Cancer), Extracranial Germ Cell Tumor, Extragonadal Germ Cell Tumor, Eye Cancer, Childhood Intraocular Melanoma, Intraocular Melanoma, Retinoblastoma, Fallopian Tube Cancer, Fibrous Histiocytoma of Bone, Malignant, and Osteosarcoma, Gallbladder Cancer, Gastric (Stomach) Cancer, Gastrointestinal Carcinoid Tumor, Gastrointestinal Stromal Tumors (GIST) (Soft Tissue Sarcoma), Childhood Gastrointestinal Stromal Tumors, Germ Cell Tumors, Childhood Extracranial Germ Cell Tumors, Extragonadal Germ Cell Tumors, Ovarian Germ Cell Tumors, Testicular Cancer, Gestational Trophoblastic Disease, Hairy Cell Leukemia, Head and Neck Cancer, Heart Tumors, Hepatocellular (Liver) Cancer, Histiocytosis, Hodgkin Lymphoma, Hypopharyngeal Cancer (Head and Neck Cancer), Intraocular Melanoma, Islet Cell Tumors, Pancreatic Neuroendocrine Tumors, Kaposi Sarcoma (Soft Tissue Sarcoma), Kidney (Renal Cell) Cancer, Langerhans Cell Histiocytosis, Laryngeal Cancer (Head and Neck Cancer), Leukemia, Lip and Oral Cavity Cancer (Head and Neck Cancer), Liver Cancer, Lung Cancer (Non-Small Cell and Small Cell), Childhood Lung Cancer, Lymphoma, Male Breast Cancer, Malignant Fibrous Histiocytoma of Bone and Osteosarcoma, Melanoma, Merkel Cell Carcinoma (Skin Cancer), Mesothelioma, Metastatic Squamous Neck Cancer with Occult Primary (Head and Neck Cancer), Midline Tract Carcinoma With NUT Gene Changes, Mouth Cancer (Head and Neck Cancer), Multiple Endocrine Neoplasia Syndromes, Multiple Myeloma/Plasma Cell Neoplasms, Mycosis Fungoides (Lymphoma), Myelodysplastic Syndromes, Myelodysplastic/Myeloproliferative Neoplasms, Nasal Cavity and Paranasal Sinus Cancer (Head and Neck Cancer), Nasopharyngeal Cancer (Head and Neck Cancer), Neuroblastoma, Non-Hodgkin Lymphoma, Non-Small Cell Lung Cancer, Oral Cancer, Lip and Oral Cavity Cancer and Oropharyngeal Cancer, Osteosarcoma and Malignant Fibrous Histiocytoma of Bone, Ovarian Cancer, Pancreatic Cancer, Pancreatic Neuroendocrine Tumors (Islet Cell Tumors), Papillomatosis, Paraganglioma, Parathyroid Cancer, Penile Cancer, Pharyngeal Cancer (Head and Neck Cancer), Pheochromocytoma, Plasma Cell Neoplasm/Multiple Myeloma, Pleuropulmonary Blastoma, Pregnancy and Breast Cancer, Primary Central Nervous System (CNS) Lymphoma, Primary Peritoneal Cancer, Prostate Cancer, Rectal Cancer, Recurrent Cancer, Renal Cell (Kidney) Cancer, Retinoblastoma, Rhabdomyosarcoma, Childhood (Soft Tissue Sarcoma), Salivary Gland Cancer (Head and Neck Cancer), Sarcoma, Childhood Rhabdomyosarcoma (Soft Tissue Sarcoma), Childhood Vascular Tumors (Soft Tissue Sarcoma), Ewing Sarcoma (Bone Cancer), Kaposi Sarcoma (Soft Tissue Sarcoma), Osteosarcoma (Bone Cancer), Uterine Sarcoma, Sezary Syndrome, Lymphoma, Skin Cancer, Small Cell Lung Cancer, Small Intestine Cancer, Soft Tissue Sarcoma, Squamous Cell Carcinoma of the Skin, Squamous Neck Cancer, Stomach (Gastric) Cancer, T-Cell Lymphoma, Testicular Cancer, Throat Cancer (Head and Neck Cancer), Nasopharyngeal Cancer, Oropharyngeal Cancer, Hypopharyngeal Cancer, Thymoma and Thymic Carcinoma, Thyroid Cancer, Transitional Cell Cancer of the Renal Pelvis and Ureter, Renal Cell Cancer, Urethral Cancer, Uterine Sarcoma, Vaginal Cancer, Vascular Tumors (Soft Tissue Sarcoma), Vulvar Cancer, Wilms Tumor and Other Childhood Kidney Tumors.

[0686] In some embodiments of the methods of the disclosure, a subject of the disclosure has been diagnosed with the disease or disorder. In some embodiments, the subject of the disclosure presents at least one sign or symptom of the disease or disorder. In some embodiments, the subject has a biomarker predictive of a risk of developing the disease or disorder. In some embodiments, the biomarker is a genetic mutation.

[0687] In some embodiments of the methods of the disclosure, a subject of the disclosure is female. In some embodiments of the methods of the disclosure, a subject of the disclosure is male. In some embodiments, a subject of the disclosure has two XX or XY chromosomes. In some embodiments, a subject of the disclosure has two XX or XY chromosomes and a third chromosome, either an X or a Y.

[0688] In some embodiments of the methods of the disclosure, a subject of the disclosure is a neonate, an infant, a child, an adult, a senior adult, or an elderly adult. In some embodiments of the methods of the disclosure, a subject of the disclosure is at least 1, 2, 3, 4, 5, 6, 7, 8, 9, 10, 11, 12, 13, 14, 15, 16, 17, 18, 19, 20, 21, 22, 23, 24, 25, 26, 27, 28, 29, 30 or 31 days old. In some embodiments of the methods of the disclosure, a subject of the disclosure is at least 1, 2, 3, 4, 5, 6, 7, 8, 9, 10, 11 or 12 months old. In some embodiments of the methods of the disclosure, a subject of the disclosure is at least 1, 2, 3, 4, 5, 6, 7, 8, 9, 10, 15, 20, 25, 30, 35, 40, 45, 50, 55, 60, 65, 70, 75, 80, 85, 90, 95, 100 or any number of years or partial years in between of age.

[0689] In some embodiments of the methods of the disclosure, a subject of the disclosure is a mammal. In some embodiments, a subject of the disclosure is a non-human mammal.

[0690] In some embodiments of the methods of the disclosure, a subject of the disclosure is a human.

[0691] In some embodiments of the methods of the disclosure, a therapeutically effective amount comprises a single dose of a composition of the disclosure. In some embodiments, a therapeutically effective amount comprises a therapeutically effective amount comprises at least one dose of a composition of the disclosure. In some embodiments, a therapeutically effective amount comprises a therapeutically effective amount comprises one or more dose(s) of a composition of the disclosure.

[0692] In some embodiments of the methods of the disclosure, a therapeutically effective amount eliminates a sign or symptom of the disease or disorder. In some embodiments, a therapeutically effective amount reduces a severity of a sign or symptom of the disease or disorder.

[0693] In some embodiments of the methods of the disclosure, a therapeutically effective amount eliminates the disease or disorder.

[0694] In some embodiments of the methods of the disclosure, a therapeutically effective amount prevents an onset of a disease or disorder. In some embodiments, a therapeutically effective amount delays the onset of a disease or disorder. In some embodiments, a therapeutically effective amount reduces the severity of a sign or symptom of the disease or disorder. In some embodiments, a therapeutically effective amount improves a prognosis for the subject.

[0695] In some embodiments of the methods of the disclosure, a composition of the disclosure is administered to the subject systemically. In some embodiments, the composition of the disclosure is administered to the subject by an intravenous route. In some embodiments, the composition of the disclosure is administered to the subject by an injection or an infusion.

[0696] In some embodiments of the methods of the disclosure, a composition of the disclosure is administered to the subject locally. In some embodiments, the composition of the disclosure is administered to the subject by an intraosseous, intraocular, intracerebrospinal or intraspinal route. In some embodiments, the composition of the disclosure is administered directly to the cerebral spinal fluid of the central nervous system. In some embodiments, the composition of the disclosure is administered directly to a tissue or fluid of the eye and does not have bioavailability outside of ocular structures. In some embodiments, the composition of the disclosure is administered to the subject by an injection or an infusion.

[0697] In some embodiments, the compositions disclosed herein are formulated as pharmaceutical compositions. Briefly, pharmaceutical compositions for use as disclosed herein may comprise a protein(s) or a polynucleotide encoding the protein(s), optionally comprised in an AAV, which is optionally also immune orthogonal, in combination with one or more pharmaceutically or physiologically acceptable carriers, diluents or excipients. Such compositions may comprise buffers such as neutral buffered saline, phosphate buffered saline and the like; carbohydrates such as glucose, mannose, sucrose or dextrans, mannitol; proteins; polypeptides or amino acids such as glycine; antioxidants; chelating agents such as EDTA or glutathione; adjuvants (e.g., aluminum hydroxide); and preservatives. Compositions of the disclosure may be formulated for routes of administration, such as e.g., oral, enteral, topical, transdermal, intranasal, and/or inhalation; and for routes of administration via injection or infusion such as, e.g., intravenous, intramuscular, subpial, intrathecal, intrastriatal, subcutaneous, intradermal, intraperitoneal, intratumoral, intravenous, intraocular, and/or parenteral administration. In some embodiments, intraocular administration includes, without limitation, subretinal, intravitreal, deep intravitreal, or topical (via eye drops) administration. In one embodiment, subretinal injection targets photoreceptors and RPE (retinal pigment epithelium) cells. In certain embodiments, the compositions of the present disclosure are formulated for intravenous administration.

### Example Embodiments

[0698] Embodiment 1. A composition comprising a nucleic acid sequence encoding an RNA-guided target RNA knockdown and replacement therapeutic comprising (a) an RNA-binding polypeptide or portion thereof, and (b) a therapeutic protein, wherein the RNA-binding polypeptide binds and cleaves a target RNA when guided by a gRNA sequence, wherein a pathogenic RNA comprises the target RNA, and wherein the therapeutic protein is a replacement of gain-or-loss-of-function mutations encoded by the pathogenic RNA.

[0699] Or

[0700] A composition comprising a nucleic acid sequence encoding a target RNA knockdown and replacement therapeutic comprising (a) an RNA-binding polypeptide or portion thereof, and (b) a therapeutic protein, wherein the RNA-binding polypeptide binds and cleaves a target RNA, wherein a pathogenic RNA comprises the target RNA, and wherein the therapeutic protein is a replacement of gain-or-loss-of-function mutations encoded by the pathogenic RNA.

[0701] Or

[0702] A composition comprising a nucleic acid sequence encoding a target RNA knockdown and replacement therapeutic comprising (a) an RNA-binding polypeptide or portion thereof, and (b) a therapeutic protein, wherein the RNA-binding polypeptide binds and cleaves a target RNA, wherein a pathogenic RNA comprises the target RNA, and wherein the pathogenic RNA encodes one or more gain-of-function rhodopsin mutations, and wherein the therapeutic protein is wild-type rhodopsin or “hardened” rhodopsin which replaces the gain-or-loss-of-function rhodopsin mutations.

[0703] Embodiment 2. The composition of embodiment 1, wherein the therapeutic protein is selected from the group consisting of rhodopsin (Retinitis Pigmentosa), PRPF3 (Retinitis Pigmentosa), PRPF31 (autosomal dominant Retinitis Pigmentosa), GRN (FTD), SOD1 (ALS), PMP22 (Charcot Marie Tooth Disease), PABPN1 (Oculopharangeal Muscular Dystrophy), KCNQ4 (Hearing Loss), CLRN1 (Usher Syndrome), APOE2 (Alzheimer's Disease), APOE4 (Alzheimer's Disease), BEST1 (Eye Disease), MYBPC3 (Familial Cardiomyopathy), TNNT2 (Familial Cardiomyopathy), and TNNI3 (Familial Cardiomyopathy).

[0704] Embodiment 3. The composition of embodiment 1 or 2, wherein the pathogenic target sequence comprises or encodes at least one gain-or-loss-of-function mutation.

[0705] Embodiment 4. The composition of embodiment 1, wherein the sequence comprising the gRNA comprises a promoter capable of expressing the gRNA in a eukaryotic cell.

[0706] Embodiment 5. The composition of embodiment 4, wherein the eukaryotic cell is an animal cell.

[0707] Embodiment 6. The composition of embodiment 4, wherein the animal cell is a mammalian cell.

[0708] Embodiment 7. The composition of embodiment 5, wherein the animal cell is a human cell.

[0709] Embodiment 8. The composition of any one of embodiments 1-7, wherein the promoter is a constitutively active promoter.

[0710] Embodiment 9. The composition of any one of embodiments 1-7, wherein the promoter is isolated or derived from a promoter capable of driving expression of an RNA polymerase.

[0711] Embodiment 9. The composition of embodiment 9, wherein the promoter is isolated or derived from a U6 promoter.

[0712] Embodiment 10. The composition of any one of embodiments 1-9, wherein the promoter is isolated or derived from a promoter capable of driving expression of a transfer RNA (tRNA).

[0713] Embodiment 11. The composition of embodiment 10, wherein the promoter is isolated or derived from an alanine tRNA promoter, an arginine tRNA promoter, an asparagine tRNA promoter, an aspartic acid tRNA promoter, a cysteine tRNA promoter, a glutamine tRNA promoter, a glutamic acid tRNA promoter, a glycine tRNA promoter, a histidine tRNA promoter, an isoleucine tRNA promoter, a leucine tRNA promoter, a lysine tRNA promoter, a methionine tRNA promoter, a phenylalanine tRNA promoter, a proline tRNA promoter, a serine tRNA promoter, a threonine tRNA promoter, a tryptophan tRNA promoter, a tyrosine tRNA promoter, or a valine tRNA promoter.

[0714] Embodiment 12. The composition of embodiment 11, wherein the promoter is isolated or derived from a valine tRNA promoter.

[0715] Embodiment 13. The composition of any one of embodiments 1-12, wherein the sequence comprising the gRNA comprises a spacer sequence that specifically binds to the target RNA sequence.

[0716] Embodiment 14. The composition of embodiment 13, wherein the spacer sequence has at least 50%, 55%, 60%, 65%, 70%, 75%, 80%, 87%, 90%, 95%, 97%, 99% or any percentage in between of complementarity to the target RNA sequence.

[0717] Embodiment 15. The composition of embodiment 14, wherein the spacer sequence has 100% complementarity to the target RNA sequence.

[0718] Embodiment 16. The composition of any one of embodiments 13-15, wherein the spacer sequence comprises or consists of 20 nucleotides.

[0719] Embodiment 17. The composition of any one of embodiments 13-15, wherein the spacer sequence comprises or consists of 26 nucleotides.

[0720] Embodiment 18. The composition of any one of embodiments 1-17, wherein the sequence comprising the gRNA comprises a direct repeat (DR) or scaffold sequence that specifically binds to the first RNA binding protein.

[0721] Embodiment 20. The composition of embodiment 18, wherein the scaffold sequence comprises a stem-loop structure.

[0722] Embodiment 21. The composition of embodiment 19 or 20, wherein the scaffold sequence comprises or consists of 90 nucleotides.

[0723] Embodiment 22. The composition of embodiment 19 or 20, wherein the scaffold sequence comprises or consists of 93 nucleotides.

[0724] Embodiment 23. The composition of embodiment 22, wherein the scaffold sequence comprises the sequence

(SEQ ID NO: 403)
GUUUAAGAGCUAUGCUGGAAACAGCAUAGCAAGUUUAAAUAAGGCUAG
UCCGUUAUCAACUUGAAAAAGUGGCACCGAGUCGGUGCUUUUUUU.

[0725] Embodiment 24. The composition of embodiment 19, wherein the scaffold sequence comprises a step-loop structure.

[0726] Embodiment 25. The composition of embodiment 19, wherein the scaffold sequence comprises or consists of 85 nucleotides.

[0727] Embodiment 26. The composition of embodiment 25, wherein the scaffold sequence comprises the sequence

(SEQ ID NO: 404)
GGACAGCAUAGCAAGUUAAAAUAAGGCUAGUCCGUUAUCAACUUGAAAAAG
UGGCACCGAGUCGGUGCUUUUU.

[0728] Embodiment 27. The composition of embodiment 19, wherein the sequence comprising the gRNA comprises a DR sequence that specifically binds to the first RNA binding protein.

[0729] Embodiment 28. The composition of embodiment 27, wherein the DR sequence comprises a stem-loop structure.

[0730] Embodiment 29. The composition of embodiment 27, wherein the DR sequence comprises or consists of about 20-36 nucleotides.

[0731] Embodiment 30. The composition of embodiment 27, wherein the scaffold sequence comprises or consists of 30-32 nucleotides.

[0732] Embodiment 31. The composition of embodiment 27, wherein the DR sequence comprises the nucleotide sequence comprising

(SEQ ID NO: 461)
AACCCCTACCAACTGGTCGGGGTTTGAAAC.

[0733] Embodiment 32. The composition of any one of embodiments 1-31, wherein the gRNA does not bind or does not selectively bind to a second sequence within the RNA molecule.

[0734] Embodiment 33. The composition of embodiment 32, wherein an RNA genome or an RNA transcriptome comprises the RNA molecule.

[0735] Embodiment 34. The composition of any one of embodiments 1-33, wherein the RNA binding protein comprises a CRISPR-Cas protein.

[0736] Embodiment 35. The composition of embodiment 34, wherein the CRISPR-Cas protein is a Type II CRISPR-Cas protein.

[0737] Embodiment 36. The composition of embodiment 35, wherein the RNA binding protein comprises a Cas9 polypeptide or an RNA-binding portion thereof.

[0738] Embodiment 37. The composition of embodiment 34, wherein the CRISPR-Cas protein is a Type V CRISPR-Cas protein.

[0739] Embodiment 38. The composition of embodiment 34, wherein the RNA binding protein comprises a Cpf1 polypeptide or an RNA-binding portion thereof.

[0740] Embodiment 39. The composition of embodiment 34, wherein the CRISPR-Cas protein is a Type VI CRISPR-Cas protein.

[0741] Embodiment 40. The composition of embodiment 39, wherein the RNA binding protein comprises a Cas13 polypeptide or an RNA-binding portion thereof.

[0742] Embodiment 41. The composition of any one of embodiments 34-40, wherein the CRISPR-Cas protein comprises a native RNA nuclease activity.

[0743] Embodiment 42. The composition of embodiment 41, wherein the native RNA nuclease activity is reduced or inhibited.

[0744] Embodiment 43. The composition of embodiment 41, wherein the native RNA nuclease activity is increased or induced.

[0745] Embodiment 44. The composition of any one of embodiments 34-43, wherein the CRISPR-Cas protein comprises a native DNA nuclease activity and wherein the native DNA nuclease activity is inhibited, inactive, and/or dead (e.g., dCas).

[0746] Embodiment 45. The composition of embodiment 34, wherein the CRISPR-Cas protein comprises a mutation.

[0747] Embodiment 46. The composition of embodiment 45, wherein a nuclease domain of the CRISPR-Cas protein comprises the mutation.

[0748] Embodiment 47. The composition of embodiment 45, wherein the mutation occurs in a nucleic acid encoding the CRISPR-Cas protein.

[0749] Embodiment 48. The composition of embodiment 45, wherein the mutation occurs in an amino acid encoding the CRISPR-Cas protein.

[0750] Embodiment 49. The composition of any one of embodiments 45-48, wherein the mutation comprises a substitution, an insertion, a deletion, a frameshift, an inversion, or a transposition.

[0751] Embodiment 50. The composition of any one of embodiments 45-49, wherein the mutation comprises a deletion of a nuclease domain, a binding site within the nuclease domain, an active site within the nuclease domain, or at least one essential amino acid residue within the nuclease domain.

[0752] Embodiment 51. The composition of any one of embodiments 2-3, wherein the RNA binding protein comprises a Pumilio and FBF (PUF) protein.

[0753] Embodiment 52. The composition of embodiment 51, wherein the RNA binding protein comprises a Pumilio-based assembly (PUMBY) protein.

[0754] Embodiment 53. The composition of any one of embodiments 51-52, wherein the RNA binding protein does not require multimerization for RNA-binding activity.

[0755] Embodiment 54. The composition of embodiment 53, wherein the RNA binding protein is not a monomer of a multimer complex

[0756] Embodiment 55. The composition of embodiment 54, wherein a multimer protein complex does not comprise the first RNA binding protein.

[0757] Embodiment 56. The composition of any one of embodiments 1-55, wherein the RNA binding protein selectively binds to a pathogenic target sequence within the RNA molecule.

[0758] Embodiment 57. The composition of embodiment 56, wherein the RNA binding protein does not comprise an affinity for a second sequence within the RNA molecule.

[0759] Embodiment 58. The composition of embodiment 56 or 57, wherein the RNA binding protein does not comprise a high affinity for or selectively bind a second sequence within the RNA molecule.

[0760] Embodiment 59. The composition of embodiment 58, wherein an RNA genome or an RNA transcriptome comprises the RNA molecule.

[0761] Embodiment 60. The composition of any one of embodiments 1-59, wherein the RNA binding protein comprises between 2 and 1300 amino acids, inclusive of the endpoints.

[0762] Embodiment 61. The composition of any one of embodiments 1-60, wherein the sequence encoding the RNA binding protein further comprises a sequence encoding a nuclear localization signal (NLS).

[0763] Embodiment 62. The composition of embodiment 61, wherein the sequence encoding a nuclear localization signal (NLS) is positioned 3′ to the sequence encoding the first RNA binding protein.

[0764] Embodiment 63. The composition of embodiment 62, wherein the RNA binding protein comprises an NLS at a C-terminus of the protein.

[0765] Embodiment 64. The composition of any one of embodiments 1-63, wherein the sequence encoding the RNA binding protein further comprises a first sequence encoding a first NLS and a second sequence encoding a second NLS.

[0766] Embodiment 65. The composition of embodiment 64, wherein the sequence encoding the first NLS or the second NLS is positioned 3′ to the sequence encoding the RNA binding protein.

[0767] Embodiment 66. The composition of embodiment 65, wherein the RNA binding protein comprises the first NLS or the second NLS at a C-terminus of the protein.

[0768] Embodiment 67. The composition of any one of embodiments 1-66, wherein the second RNA binding protein comprises or consists of a nuclease domain.

[0769] Embodiment 68. A composition comprising a sequence encoding 1) a target RNA-binding fusion protein comprising (a) a sequence encoding a first RNA-binding polypeptide or portion thereof, and (b) a sequence encoding a second RNA-binding polypeptide, wherein the first RNA-binding polypeptide binds a pathogenic target RNA not guided by a gRNA sequence, and wherein the second RNA-binding polypeptide comprises RNA-nuclease activity; and 2) a therapeutic replacement protein, wherein the therapeutic replacement protein replaces a corresponding gene comprising at least one gain-or-loss-of-function mutation encoded by the pathogenic target RNA.

[0770] Embodiment 69. The composition of embodiment 68, wherein the first RNA-binding polypeptide or portion thereof is a PUF, PUMBY, or PPR polypeptide or portion thereof. Embodiment 70. A method for modifying the level of expression of a pathogenic RNA molecule or a protein encoded by the RNA molecule, the method comprising contacting the composition of embodiments 1, 2, 3 or 68 and the RNA molecule under conditions suitable for binding of the RNA-binding protein or a portion thereof to the RNA molecule. Embodiment 71. A method of manufacturing the RNA-targeting knockdown and replacement compositions disclosed herein or the vectors comprising the RNA-targeting knockdown and replacement compositions disclosed herein.

### EXAMPLES

### Example 1: RNA-Guided Cleavage of Target mRNAs

[0771] Various RNA-targeting proteins with and without an effector nuclease were constructed. The RNA-targeting proteins are either CRISPR-associated (Cas) proteins or engineered RNA binding proteins known as PUF or Pumby proteins (FIG. 1A-1E). Plasmids encoding the RNA-guided-targeting RNA-binding proteins are co-transfected with a plasmid encoding a corresponding guide RNA that targets a target RNA sequence, e.g., in genes encoding SOD1, human Rhodopsin, PRPF3, PMP22, PABPN1, KCNQ4, CLRN1, APOE2, APOE4, BEST1, MYBPC3, TNNT2, TNN13, or some other gene or mutated gene which causes a disease or leads to a disorder. Plasmids and vectors were designed using exemplary guide RNA spacer sequences which are specific to the target RNA. See SEQ ID NO: 250 to SEQ ID NO: 24960 for exemplary gRNA sequences targeting RHO, SOD1, PMP22, PABPN1, KCNQ4, CLRN1, APOE2, TNNI3, BEST1, MYBPC3, and TNNT2. A plasmid encoding a Cas13d RNA-guided-targeting RNA-binding protein was co-transfected with a plasmid encoding a corresponding guide RNA that targets a target RNA sequence. A Cas13d system based on CasRx sequences was used. Three gRNAs comprising the below spacer sequences targeting rhodopsin target RNA were constructed and used for knockdown of the rhodopsin target sequence below. The gRNAs comprised a CasRx DR sequence with the nucleic acid sequence AACCCCTACCAACTGGTCGGGGTTTGAAAC (SEQ ID NO: 461). The transfected cell line was co-transfected with a plasmid encoding the target RNA. In addition, a cell line which natively expressed the target RNA is used. The level of the target RNA was evaluated by RT-PCR. We observed knockdown of WT RHO containing mRNA.

[0772] Spacer sequences and target sequences used for Rho targeting are as detailed in table 2.

TABLE 2
Spacer sequences and target
sequences used for Rho targeting

| Spacer | Spacer Sequences | Target Sequences |
|---|---|---|
| Rho | ACATGTAGATGACAAAAGA | CAACGAGTCTTTTGTCATC |
| guide 1 | CTCGTTG (SEQ ID NO: | TACATGT (SEQ ID NO: |
| | 465) | 462) |
| Rho | TGAAGATGTAGAATGCCAC | CGCCAGCGTGGCATTCTAC |
| guide 2 | GCTGGCG (SEQ ID NO: | ATCTTCA (SEQ ID NO: |
| | 409) | 463) |
| Rho | ACTGCTTGTTCATCATGAT | CATCTATATCATGATGAAC |
| guide 3 | ATAGATG (SEQ ID NO: | AAGCAGT (SEQ ID NO: |
| | 466) | 464) |

### Example 2: Simultaneous Knockdown and Replacement of Target Genes

[0773] Vectors that carry an RNA-targeting system described in Example 1 with a codon-optimized version of the targeted gene, lacking the corresponding pathogenic mutation, were constructed (FIG. 2). The resulting vectors are capable of knocking down the endogenous, mutated gene and reconstituting expression of the same gene with a wild-type copy. Cells are transfected with the vectors. In addition, cells are infected with AAV vectors comprising the RNA-targeting systems (FIG. 2). We assess levels of both the mutated gene in cells and levels of the reconstituted, therapeutic replacement gene (FIG. 2).

### Example 3: Simultaneous Knockdown and Replacement of Target Genes in a Model of Disease

[0774] Vectors that carry an RNA-targeting system described in Example 1 with a codon-optimized version of the targeted gene, lacking the corresponding pathogenic mutation, were constructed. The resulting vectors are capable of knocking down the endogenous, mutated gene and reconstituting expression of the same gene with a wild-type copy. Mice harboring mutated copies of one of the following genes are treated with AAV vectors carrying the above systems (associated human disease in parentheses): rhodopsin (Retinitis Pigmentosa), PRPF3 (Retinitis Pigmentosa), PRPF31 (autosomal dominant Retinitis Pigmentosa), GRN (FTD), SOD1 (ALS), PMP22 (Charcot Marie Tooth Disease), PABPN1 (Oculopharangeal Muscular Dystrophy), KCNQ4 (Hearing Loss), CLRN1 (Usher Syndrome), APOE2 (Alzheimer's Disease), APOE4 (Alzheimer's Disease), BEST1 (Eye Disease), MYBPC3 (Familial Cardiomyopathy), TNNT2 (Familial Cardiomyopathy), and TNNI3 (Familial Cardiomyopathy). We assess levels of both the mutated gene in cells and levels of the reconstituted, unmutated therapeutic replacement gene in the target tissue. We also assess functional/behavioral/physiological changes in situations where these phenomena are modulated by the disease model.

### Example 4: Rhodopsin Knockdown and Replacement

[0775] For rhodopsin (RHO) knockdown detection a luciferase reporter assay was designed using the pmirGlo plasmid (FIG. 3) by introducing the wild type (WT) RHO mRNA sequence in the 3′UTR of Firefly luciferase driven by the human phosphoglycerate kinase (hPGK). The reporter plasmid also expressed Renilla luciferase driven by the SV40 promoter for normalization purposes. For knockdown and replacement of RHO 500 ng of the ‘Knockdown and Replace’ PUM and PUF constructs (1 PUMBY construct PUM14, 4 PUF constructs 26, 54, 60, 110 with different optimized PUF sequences—PUF sequences listed below) that express “hardened” Rhodopsin (RHO) open reading frame driven by the opsin promoter and EFS-promoter driven PUMBY or PUF protein linked to ZC3H12A, also termed E17 (FIG. 4, FIG. 5, FIG. 6A) targeting, for cleavage, a specific site on the WT RHO mRNA were transfected using Lipofectamine 3000 (Thermo) into CosM6 cells (according to the manufacturer's protocol) along with the 100 ng of the pmirGlo reporter. Cells were washed and RNA was collected using the Qiagen RNeasy kit. RT-qPCR for normal and hardened Rhodopsin was performed using the Quantabio 1-step RT-qPCR kit, Biorad qPCR machine and the following primer sets: Firefly Luciferase-Forward: GTGGTGTGCAGCGAGAATAG (SEQ ID NO: 410) Reverse: CGCTCGTTGTAGATGTCGTTAG (SEQ ID NO: 411); Renilla Luciferase-Forward: TTCTGGATTCATCGACTGTG (SEQ ID NO: 412) Reverse: TTCAGCAATATCACGGGTAG (SEQ ID NO: 413); Hardened RHO-Forward: ACTGCATGCTCACCACCAT (SEQ ID NO: 414) Reverse: CGAAGAACTCCAGCATGAGA (SEQ ID NO: 415). Firefly luciferase expression was used as the measure of WT RHO mRNA knockdown normalized Renilla Luciferase mRNA expression used to control for transfection. Hardened Rhodopsin expression was normalized to GAPDH and was a measure of replacement. We observed that our knockdown and replace vectors were able to knockdown WT RHO containing mRNA and decrease Firefly Luciferase expression while simultaneously expressing hardened RHO levels of which were sustained. (FIGS. 6B-C and 7A-B).

TABLE 3
PUF and PUMBY Sequences used in the
Knockdown and Replacement Studies

| | Target sequence | Target sequence | Hardened Sequence |
|---|---|---|---|
| Construct | 8 nucleotides | 16 nucleotides | on replacement |
| PUF110 | UCAUCAUG (SEQ ID | GUCAUCAUCAUGGUC | GTGATTATTATGGTG |
| (A000YH) | NO: 549) | A (SEQ ID NO: 550) | A (SEQ ID NO: 551) |
| PUF54 | CCUGUGGU (SEQ ID | UUGCCCUGUGGUCCU | TCGCTCTCTGGTCTTT |
| (A000XL) | NO: 552) | U (SEQ ID NO: 553) | (SEQ ID NO: 554) |
| PUF60 | GGUGUGUA (SEQ | UGGUGGUGUGUAAGC | TCGTCGTCTGCAAAC |
| (A000XM) | ID NO: 555) | C (SEQ ID NO: 556) | C (SEQ ID NO: 557) |
| PUF26 | UCUACGUC (SEQ ID | ACGCUCUACGUCACC | ACCCTGTATGTGACA |
| (A000XK) | NO: 558) | G (SEQ ID NO: 559) | G (SEQ ID NO: 560) |
| PUMBY14 | GUGGCAUUCUACA | CGUGGCAUUCUACAU | CGTAGCTTTTTATAT |
| (A000FS) | U (SEQ ID NO: 561) | C (SEQ ID NO: 562) | T (SEQ ID NO: 563) |

[0776] The following sequences are present at the Knockdown module for the above referenced plasmids.

[0777] Original PUF26 amino acid sequence:

(SEQ ID NO: 393
MGRSRLLEDFRNNRYPNLQLREIAGHIMEFSQDQHGSRFIRLKLERATPAE
RQLVFNEILQAAYQLMVDVFGNYVIQKFFEFGSLEQKLALAERIRGHVLSL
ALQMYGSRVIEKALEFIPSDQQNEMVRELDGHVLKCVKDQNGSYVVRKCIE
CVQPQSLQFIIDAFKGQVFALSTHPYGCRVIQRILEHCLPDQTLPILEELH
QHTEQLVQDQYGNYVIQHVLEHGRPEDKSKIVAEIRGNVLVLSQHKFASYV
VRKCVTHASRTERAVLIDEVCTMNDGPHSALYTMMKDQYANYVVQKMIDVA
EPGQRKIVMHKIRPHIATLRKYTYGKHILAKLEKYYMKNGVDLG

[0778] The Optimized (for Homo sapiens(Human)) sequence of PUF26

[0779] A 285 T 205 C 286 G 292 |GC %: 54.12%|Length: 1068

(SEQ ID NO: 394)
ATGGGAAGGAGCAGACTCCTCGAGGACTTTAGGAACAATAGATACCCCAAC
CTCCAGCTGAGAGAAATCGCCGGCCACATCATGGAGTTCAGCCAAGACCAG
CACGGATCTAGATTCATTAGGCTGAAGCTCGAGAGAGCTACACCCGCCGAG
AGGCAACTGGTGTTCAATGAGATTCTGCAAGCCGCCTACCAGCTCATGGTC
GACGTCTTCGGAAACTACGTGATCCAGAAGTTCTTCGAGTTCGGATCTCTG
GAGCAGAAACTCGCTCTGGCTGAGAGGATCAGAGGCCATGTGCTGTCTCTG
GCTCTCCAGATGTACGGCTCTAGAGTGATCGAGAAAGCCCTCGAGTTCATC
CCCTCCGACCAACAGAATGAGATGGTGAGGGAGCTGGACGGCCACGTGCTG
AAATGTGTGAAGGACCAGAACGGCTCCTACGTCGTGAGAAAGTGCATTGAG
TGCGTGCAGCCCCAGAGCCTCCAGTTTATCATCGACGCCTTCAAGGGCCAA
GTGTTCGCTCTCAGCACCCATCCTTACGGCTGTAGAGTCATCCAGAGAATT
CTGGAGCATTGCCTCCCCGACCAGACACTGCCTATTCTCGAGGAGCTCCAT
CAGCATACCGAGCAACTCGTCCAAGACCAGTACGGCAACTACGTGATTCAG
CATGTGCTGGAGCATGGCAGACCCGAGGACAAGAGCAAGATCGTGGCTGAG
ATCAGAGGCAATGTGCTGGTGCTGAGCCAGCACAAATTCGCCAGCTATGTG
GTGAGGAAGTGTGTGACACACGCCTCTAGAACAGAGAGGGCTGTGCTCATC
GATGAGGTGTGCACCATGAACGATGGCCCTCACAGCGCTCTGTACACCATG
ATGAAGGACCAGTACGCCAACTACGTGGTGCAGAAAATGATCGACGTGGCT
GAGCCCGGCCAGAGGAAAATCGTGATGCACAAGATCAGACCTCATATCGCC
ACCCTCAGAAAGTACACCTATGGCAAACACATTCTGGCCAAGCTCGAGAAG
TACTACATGAAAAATGGCGTCGATCTGGGC

[0780] The original sequence of PUF54

(SEQ ID NO: 395)
MGRSRLLEDFRNNRYPNLQLREIAGHIMEFSQDQHGNRFIQLKLERATPAE
RQLVFNEILQAAYQLMVDVFGSYVIEKFFEFGSLEQKLALAERIRGHVLSL
ALQMYGSRVIEKALEFIPSDQQNEMVRELDGHVLKCVKDQNGNYVVQKCIE
CVQPQSLQFIIDAFKGQVFALSTHPYGSRVIERILEHCLPDQTLPILEELH
QHTEQLVQDQYGNYVIQHVLEHGRPEDKSKIVAEIRGNVLVLSQHKFASYV
VRKCVTHASRTERAVLIDEVCTMNDGPHSALYTMMKDQYASYVVRKMIDVA
EPGQRKIVMHKIRPHIATLRKYTYGKHILAKLEKYYMKNGVDLG

[0781] The Optimized (for Homo sapiens(Human)) sequence of PUF54

[0782] A 290 T 194 C 285 G 299 |GC %: 54.68%|Length: 1068

(SEQ ID NO: 396)
ATGGGAAGATCCAGACTGCTGGAGGACTTTAGAAACAATAGGTACCCCAAT
CTGCAGCTGAGAGAGATCGCCGGCCACATCATGGAATTCAGCCAAGACCAG
CACGGCAATAGATTCATCCAGCTGAAGCTCGAGAGGGCTACACCCGCTGAG
AGGCAGCTGGTCTTCAACGAGATTCTGCAAGCCGCCTATCAACTGATGGTG
GACGTGTTCGGCAGCTATGTGATCGAGAAGTTCTTCGAATTCGGCTCTCTG
GAACAGAAGCTGGCTCTGGCCGAGAGGATCAGAGGCCATGTGCTGTCTCTG
GCTCTGCAGATGTACGGCTCTAGAGTCATCGAGAAGGCCCTCGAGTTCATC
CCCTCCGACCAACAGAACGAGATGGTGAGGGAGCTGGACGGACACGTGCTG
AAGTGCGTGAAGGACCAGAACGGAAACTACGTCGTCCAGAAGTGCATCGAA
TGCGTGCAGCCCCAGAGCCTCCAGTTCATTATCGACGCCTTCAAGGGCCAA
GTGTTCGCCCTCAGCACACACCCTTACGGAAGCAGAGTGATCGAGAGGATT
CTGGAGCACTGTCTGCCCGACCAGACACTGCCTATTCTGGAGGAGCTGCAC
CAACACACAGAGCAGCTGGTGCAAGACCAGTACGGCAACTATGTCATTCAG
CACGTCCTCGAGCATGGCAGACCCGAGGACAAAAGCAAGATCGTCGCCGAA
ATCAGAGGCAATGTGCTGGTGCTCAGCCAACACAAGTTCGCTTCCTACGTC
GTGAGGAAGTGCGTGACACACGCTTCCAGAACAGAGAGAGCCGTGCTCATC
GATGAGGTGTGCACCATGAACGATGGCCCTCACAGCGCTCTGTATACCATG
ATGAAGGACCAATACGCCAGCTATGTGGTGAGAAAGATGATCGACGTGGCT
GAACCCGGCCAGAGAAAGATCGTGATGCACAAGATCAGACCCCACATTGCC
ACACTGAGGAAGTATACCTACGGCAAGCACATTCTGGCCAAGCTCGAGAAG
TACTACATGAAGAACGGAGTGGATCTGGGC

[0783] The original sequence of PUF60

(SEQ ID NO: 397)
MGRSRLLEDFRNNRYPNLQLREIAGHIMEFSQDQHGSRFIQLKLERATPAE
RQLVFNEILQAAYQLMVDVFGNYVIQKFFEFGSLEQKLALAERIRGHVLSL
ALQMYGSRVIEKALEFIPSDQQNEMVRELDGHVLKCVKDQNGNYVVQKCIE
CVQPQSLQFIIDAFKGQVFALSTHPYGSRVIERILEHCLPDQTLPILEELH
QHTEQLVQDQYGNYVIQHVLEHGRPEDKSKIVAEIRGNVLVLSQHKFASNV
VEKCVTHASRTERAVLIDEVCTMNDGPHSALYTMMKDQYASYVVEKMIDVA
EPGQRKIVMHKIRPHIATLRKYTYGKHILAKLEKYYMKNGVDLG

[0784] The Optimized (for Homo sapiens(Human)) sequence of PUF60

[0785] A 288 T 201 C 281 G 298 |GC %: 54.21%|Length: 1068

(SEQ ID NO: 398)
ATGGGAAGATCCAGACTGCTGGAGGACTTTAGAAATAATAGATACCCCAAT
CTGCAGCTGAGGGAAATCGCTGGCCACATCATGGAGTTCTCCCAAGACCAG
CATGGATCTAGATTCATCCAGCTGAAGCTCGAGAGAGCCACCCCCGCCGAA
AGGCAGCTCGTCTTCAACGAAATTCTGCAAGCCGCCTACCAACTGATGGTG
GATGTGTTTGGCAACTACGTGATCCAGAAGTTCTTCGAATTTGGCAGCCTC
GAGCAGAAGCTGGCTCTGGCCGAAAGAATTAGAGGCCATGTGCTGTCTCTG
GCCCTCCAGATGTATGGCTCTAGAGTCATCGAAAAGGCTCTGGAGTTCATC
CCCTCCGACCAGCAGAACGAGATGGTGAGAGAGCTCGACGGACATGTGCTG
AAGTGTGTGAAGGACCAGAACGGCAATTACGTCGTCCAGAAGTGCATCGAG
TGCGTGCAGCCCCAGTCTCTGCAGTTTATCATCGACGCCTTCAAGGGCCAA
GTGTTCGCTCTGAGCACACACCCTTACGGCAGCAGAGTGATCGAGAGGATT
CTGGAACACTGTCTGCCCGACCAGACACTGCCTATTCTGGAGGAGCTGCAC
CAGCACACAGAGCAGCTGGTGCAAGACCAGTACGGCAACTATGTGATCCAG
CATGTGCTGGAGCATGGCAGACCCGAGGACAAGAGCAAGATCGTGGCCGAA
ATCAGAGGCAACGTGCTGGTGCTGAGCCAGCACAAGTTCGCCTCCAACGTG
GTGGAAAAGTGCGTGACCCACGCTTCTAGAACAGAAAGGGCTGTGCTCATC
GATGAGGTGTGTACCATGAACGATGGCCCTCACAGCGCTCTGTACACCATG
ATGAAAGACCAGTACGCCAGCTACGTGGTGGAGAAAATGATCGACGTCGCT
GAGCCCGGCCAGAGGAAGATCGTGATGCACAAGATCAGACCCCACATTGCC
ACACTGAGGAAGTACACCTATGGCAAACACATTCTGGCCAAGCTCGAGAAG
TACTACATGAAGAACGGAGTGGATCTGGGC

[0786] The original sequence of PUF110

(SEQ ID NO: 399)
MGRSRLLEDFRNNRYPNLQLREIAGHIMEFSQDQHGSRFIELKLERATPAE
RQLVFNEILQAAYQLMVDVFGNYVIQKFFEFGSLEQKLALAERIRGHVLSL
ALQMYGCRVIQKALEFIPSDQQNEMVRELDGHVLKCVKDQNGSYVVRKCIE
CVQPQSLQFIIDAFKGQVFALSTHPYGNRVIQRILEHCLPDQTLPILEELH
QHTEQLVQDQYGCYVIQHVLEHGRPEDKSKIVAEIRGNVLVLSQHKFASYV
VRKCVTHASRTERAVLIDEVCTMNDGPHSALYTMMKDQYANYVVQKMIDVA
EPGQRKIVMHKIRPHIATLRKYTYGKHILAKLEKYYMKNGVDLG

[0787] The Optimized (for Homo sapiens(Human)) sequence of PUF110

[0788] A 292 T 196 C 293 G 287 |GC %: 54.31%|Length: 1068

(SEQ ID NO: 400)
ATGGGAAGATCCAGACTGCTGGAGGACTTTAGAAACAATAGGTACCCCAAC
CTCCAGCTGAGAGAAATCGCCGGCCACATCATGGAGTTCAGCCAAGACCAG
CACGGCTCTAGATTTATTGAGCTGAAGCTCGAGAGAGCCACCCCCGCCGAG
AGGCAACTGGTGTTCAATGAGATTCTGCAAGCCGCCTACCAGCTCATGGTC
GACGTCTTCGGCAACTACGTCATCCAGAAGTTCTTCGAGTTCGGCTCTCTG
GAACAGAAGCTGGCTCTGGCCGAGAGGATCAGAGGCCACGTGCTGTCCCTC
GCTCTGCAGATGTACGGCTGTAGGGTGATCCAGAAGGCTCTGGAGTTCATC
CCTTCCGACCAGCAGAACGAGATGGTGAGAGAGCTGGATGGACACGTGCTG
AAATGCGTCAAGGACCAGAACGGCTCCTATGTGGTGAGAAAGTGCATCGAG
TGCGTGCAGCCCCAGTCTCTGCAGTTCATCATCGACGCCTTCAAGGGCCAA
GTCTTCGCCCTCAGCACACACCCTTACGGAAATAGAGTCATCCAGAGGATT
CTGGAACACTGTCTGCCCGACCAGACACTGCCTATTCTGGAGGAGCTGCAC
CAACACACAGAGCAGCTGGTCCAAGACCAGTATGGCTGCTACGTGATCCAG
CACGTGCTGGAGCATGGAAGACCCGAGGATAAGAGCAAGATCGTCGCCGAA
ATCAGAGGCAATGTGCTGGTGCTCAGCCAACACAAGTTCGCTTCCTACGTC
GTGAGGAAATGCGTGACACACGCTTCTAGAACAGAAAGGGCCGTGCTCATC
GATGAGGTGTGCACCATGAACGATGGCCCCCACAGCGCTCTGTATACCATG
ATGAAGGACCAGTACGCCAACTACGTGGTGCAGAAGATGATCGACGTGGCT
GAGCCCGGCCAGAGGAAGATTGTGATGCACAAGATTAGGCCCCATATCGCC
ACACTGAGAAAGTACACCTACGGAAAGCATATCCTCGCCAAGCTCGAGAAG
TACTACATGAAGAACGGCGTCGACCTCGGC

[0789] The PUMBY (PUM14) targeting rhodopsin comprises the amino acid sequence:

(SEQ ID NO: 401)
MGRSRLLEDFRNNRYPNLQLREIAHTEQLVQDQYGNYVIQHVLEHGRPEDK
SKIVAEIRGHTEQLVQDQYGCYVIQHVLEHGRPEDKSKIVAEIRGHTEQLV
QDQYGSYVIRHVLEHGRPEDKSKIVAEIRGHTEQLVQDQYGCYVIQHVLEH
GRPEDKSKIVAEIRGHTEQLVQDQYGNYVIQHVLEHGRPEDKSKIVAEIRG
HTEQLVQDQYGSYVIRHVLEHGRPEDKSKIVAEIRGHTEQLVQDQYGNYVI
QHVLEHGRPEDKSKIVAEIRGHTEQLVQDQYGNYVIQHVLEHGRPEDKSKI
VAEIRGHTEQLVQDQYGCYVIQHVLEHGRPEDKSKIVAEIRGHTEQLVQDQ
YGSYVIRHVLEHGRPEDKSKIVAEIRGHTEQLVQDQYGSYVIEHVLEHGRP
EDKSKIVAEIRGHTEQLVQDQYGSYVIEHVLEHGRPEDKSKIVAEIRGHTE
QLVQDQYGNYVIQHVLEHGRPEDKSKIVAEIRGHTEQLVQDQYGSYVIEHV
LEHGRPEDKSKIVAEIRGPHIATLRKYTYGKHILAKLEKYYMKNGVDLGG
R.

[0790] The PUMBY (PUM14) targeting rhodopsin comprises the nucleic acid sequence:

(SEQ ID NO: 402)
ATGGGCAGAAGCCGGCTGCTGGAAGATTTCCGGAACAACAGATACCCCAAC
CTGCAGCTGAGAGAGATCGCCCACACAGAGCAGCTGGTGCAGGACCAGTAC
GGCAACTACGTGATCCAGCATGTGCTGGAACACGGCAGACCCGAGGACAAG
TCTAAGATCGTGGCCGAGATCAGAGGCCACACCGAACAGCTCGTCCAGGAT
CAATACGGCTGTTATGTGATTCAGCACGTCCTCGAGCACGGACGGCCTGAG
GATAAGAGCAAAATTGTGGCCGAAATCCGGGGCCATACTGAACAACTGGTT
CAGGATCAGTATGGGTCCTATGTGATCCGCCACGTCCTGGAACATGGACGC
CCAGAGGACAAAAGCAAGATCGTCGCTGAGATTCGGGGACATACCGAGCAA
CTCGTCCAAGACCAGTACGGCTGTTACGTGATCCAGCATGTGCTGGAACAC
GGCAGACCCGAGGACAAGTCTAAGATCGTGGCCGAGATCAGAGGCCACACC
GAACAGCTGGTGCAGGACCAGTACGGCAACTATGTGATTCAGCACGTCCTC
GAGCACGGACGGCCTGAGGATAAGAGCAAAATTGTGGCCGAAATCCGGGGA
CACACAGAGCAGCTCGTCCAGGATCAGTATGGCTCCTACGTGATCAGACAC
GTTTTGGAGCACGGCAGGCCAGAAGATAAGTCCAAGATTGTCGCTGAGATT
CGCGGGCATACTGAGCAACTGGTGCAAGATCAATACGGGAATTACGTCATC
CAACACGTTCTCGAACATGGAAGGCCAGAGGACAAAAGCAAGATCGTCGCA
GAAATTAGGGGCCATACAGAACAACTGGTCCAGGACCAGTACGGCAACTAC
GTGATCCAGCATGTGCTGGAACACGGCAGACCCGAGGACAAGTCTAAGATC
GTGGCCGAGATCAGAGGCCACACCGAACAGCTGGTGCAGGATCAGTACGGC
TGTTATGTGATTCAGCACGTCCTCGAGCACGGACGGCCTGAGGATAAGAGC
AAAATTGTGGCCGAAATCCGGGGACACACAGAGCAGCTGGTCCAAGACCAG
TATGGAAGCTATGTCATCAGGCACGTCCTGGAACATGGACGCCCAGAGGAC
AAAAGCAAGATCGTCGCTGAGATTCGGGGCCATACTGAGCAGCTCGTTCAG
GACCAATACGGGTCTTACGTGATCGAACACGTGTTGGAGCATGGCAGGCCC
GAAGATAAGTCCAAAATTGTCGCAGAGATACGCGGCCACACCGAACAGCTG
GTGCAGGATCAGTACGGCAGCTACGTGATCGAGCATGTGCTGGAACACGGC
AGACCCGAGGACAAGTCTAAGATCGTGGCCGAGATCAGAGGCCACACCGAG
CAGCTCGTTCAGGACCAGTATGGCAATTATGTGATCCAGCACGTCCTCGAG
CACGGACGGCCTGAGGATAAGAGCAAAATTGTGGCCGAAATCCGGGGACAC
ACAGAGCAACTGGTCCAAGACCAGTACGGCTCCTATGTGATTGAACACGTT
CTGGAACATGGACGCCCAGAGGACAAAAGCAAGATCGTCGCTGAGATTCGG
GGCCCTCACATTGCCACACTGCGGAAGTACACCTACGGCAAGCACATCCTG
GCCAAGCTGGAAAAGTACTACATGAAGAACGGCGTGGACCTCGGCGGCAG
A.

### Example 5: Knockdown Replacement Screening of Additional Candidates

[0791] A Rhodopsin (RHO) knockdown detection luciferase reporter assay was described and carried out as in previous Example 4.

[0792] Additional PUF candidates were detailed as depicted in Table 4.

TABLE 4
Additional PUF candidates for Knockdown Replacement

| | Target sequence | Target sequence | Hardened Sequence |
|---|---|---|---|
| Construct | 8 nucleotides | 16 nucleotides | on replacement |
| PUF08 | CGGGUGUG | GCGACGGGUGUGGUAC | GCCACCGGCGTCGTGC |
| (P001MC) | (SEQ ID NO: 564) | (SEQ ID NO: 579) | (SEQ ID NO: 594) |
| PUF16 | CAGUUCUC | AUGGCAGUUCUCCAUG | CTGGCAATTTTCTATG |
| (P001MD) | (SEQ ID NO: 565) | (SEQ ID NO: 580) | (SEQ ID NO: 595) |
| PUF22 | CUGGGCUU | CGUGCUGGGCUUCCCC | TGTCCTCGGATTTCCT |
| (P001ME) | (SEQ ID NO: 566) | (SEQ ID NO: 581) | (SEQ ID NO: 596) |
| PUF34 | AACCUAGC | GCUCAACCUAGCCGUG | CCTGAATCTGGCTGTC |
| (P001MG) | (SEQ ID NO: 567) | (SEQ ID NO: 582) | (SEQ ID NO: 597) |
| PUF56 | UGGUCCUG | UUGGUGGUCCUGGCCA | TTAGTCGTGCTCGCTA |
| (P001MI) | (SEQ ID NO: 568) | (SEQ ID NO: 583) | (SEQ ID NO: 598) |
| PUF64 | UUCGGGGA | CCGCUUCGGGGAGAAC | TCGGTTTGGCGAAAAT |
| (P00005) | (SEQ ID NO: 569) | (SEQ ID NO: 584) | (SEQ ID NO: 599) |
| PUF66 | UGCCAUCA | ACCAUGCCAUCAUGGG | ATCACGCTATTATGGG |
| (P001MK) | (SEQ ID NO: 570) | (SEQ ID NO: 585) | (SEQ ID NO: 600) |
| PUF90 | CGUGGUCC | UGUUCGUGGUCCACUU | TGTTTGTCGTGCATTT |
| (P001MM) | (SEQ ID NO: 571) | (SEQ ID NO: 586) | (SEQ ID NO: 601) |
| PUF102 | GCAGCAGG | CCCAGCAGCAGGAGUC | CTCAACAACAAGAATC |
| (P001MN) | (SEQ ID NO: 572) | (SEQ ID NO: 587) | (SEQ ID NO: 602) |
| PUF112 | GCUUUCCU | CAUCGCUUUCCUGAUC | GATTGCATTTCTCATT |
| (P001MP) | (SEQ ID NO: 573) | (SEQ ID NO: 588) | (SEQ ID NO: 603) |
| PUF122 | UCGGUCCC | AACUUCGGUCCCAUCU | AATTTTGGCCCTATTT |
| (P001MQ) | (SEQ ID NO: 574) | (SEQ ID NO: 589) | (SEQ ID NO: 604) |
| PUF128 | GCGCCGCC | AAGAGCGCCGCCAUCU | AAAAGTGCTGCTATTT |
| (P001MR) | (SEQ ID NO: 575) | (SEQ ID NO: 590) | (SEQ ID NO: 605) |
| PUF130 | AACCCUGU | CUACAACCCUGUCAUC | TTATAATCCAGTGATT |
| (P00006) | (SEQ ID NO: 576) | (SEQ ID NO: 591) | (SEQ ID NO: 606) |
| PUF154 | ACUAUAGG | GCCGACUAUAGGCGUC | GCAGATTAGAGCCGAC |
| (P001MS) | (SEQ ID NO: 577) | (SEQ ID NO: 592) | (SEQ ID NO: 607) |
| PUF166 | CACAUAGG | AAGUCACAUAGGCUCC | AACTCTCAGAGCCTCT |
| (P001MT) | (SEQ ID NO: 578) | (SEQ ID NO: 593) | (SEQ ID NO: 608) |

### INCORPORATION BY REFERENCE

[0793] Every document cited herein, including any cross referenced or related patent or application is hereby incorporated herein by reference in its entirety unless expressly excluded or otherwise limited. The citation of any document is not an admission that it is prior art with respect to any invention disclosed or embodimented herein or that it alone, or in any combination with any other reference or references, teaches, suggests or discloses any such invention. Further, to the extent that any meaning or definition of a term in this document conflicts with any meaning or definition of the same term in a document incorporated by reference, the meaning or definition assigned to that term in this document shall govern.

### OTHER EMBODIMENTS

[0794] While particular embodiments of the disclosure have been illustrated and described, various other changes and modifications can be made without departing from the spirit and scope of the disclosure. The scope of the appended claims includes all such changes and modifications that are within the scope of this disclosure.

The application's sequence listing, which the Patent Office published only in electronic form, follows.

SEQUENCE LISTING (29242 sequences)

SEQ ID NO: 1 - protein, 954 aa, Artificial Sequence
  Eubacterium siraeum nCas1
MGKKIHARDLREQRKTDRTEKFADQNKKREAERAVPKKDAAVSVKSVSSVSSKKDNVTKSMAKAAGVKSVFAVGNTVYMTSFGRGNDAVLEQKIVDTSHEPLNIDDPAYQLNVVTMNGYSVTGHRGETVSAVTDNPLRRFNGRKKDEPEQSVPTDMLCLKPTLEKKFFGKEFDDNIHIQLIYNILDIEKILAVYSTNAIYALNNMSADENIENSDFFMKRTTDETFDDFEKKKESTNSREKADFDAFEKFIGNYRLAYFADAFYVNKKNPKGKAKNVLREDKELYSVLTLIGKLRHWCVHSEEGRAEFWLYKLDELKDDFKNVLDVVYNRPVEEINNRFIENNKVNIQILGSVYKNTDIAELVRSYYEFLITKKYKNMGFSIKKLRESMLEGKGYADKEYDSVRNKLYQMTDFILYTGYINEDSDRADDLVNTLRSSLKEDDKTTVYCKEADYLWKKYRESIREVADALDGDNIKKLSKSNIEIQEDKLRKCFISYADSVSEFTKLIYLLTRFLSGKEINDLVTTLINKFDNIRSFLEIMDELGLDRTFTAEYSFFEGSTKYLAELVELNSFVKSCSFDINAKRTMYRDALDILGIESDKTEEDIEKMIDNILQIDANGDKKLKKNNGLRNFIASNVIDSNRFKYLVRYGNPKKIRETAKCKPAVRFVLNEIPDAQIERYYEACCPKNTALCSANKRREKLADMIAEIKFENFSDAGNYQKANVTSRTSEAEIKRKNQAIIRLYLTVMYIMLKNLVNVNARYVIAFHCVERDTKLYAESGLEVGNIEKNKTNLTMAVMGVKLENGIIKTEFDKSFAENAANRYLRNARWYKLILDNLKKSERAVVNEFRNTVCHLNAIRNININIKEIKEVENYFALYHYLIQKHLENRFADKKVERDTGDFISKLEEHKTYCKDFVKAYCTPFGYNLVRYKNLTIDGLFDKNYPGKDDSDEQK

SEQ ID NO: 2 - protein, 954 aa, Artificial Sequence
  Eubacterium siraeum nCas1 HEPN-/-
MGKKIHARDLREQRKTDRTEKFADQNKKREAERAVPKKDAAVSVKSVSSVSSKKDNVTKSMAKAAGVKSVFAVGNTVYMTSFGRGNDAVLEQKIVDTSHEPLNIDDPAYQLNVVTMNGYSVTGHRGETVSAVTDNPLRRFNGRKKDEPEQSVPTDMLCLKPTLEKKFFGKEFDDNIHIQLIYNILDIEKILAVYSTNAIYALNNMSADENIENSDFFMKRTTDETFDDFEKKKESTNSREKADFDAFEKFIGNYRLAYFADAFYVNKKNPKGKAKNVLREDKELYSVLTLIGKLAHWCVASEEGRAEFWLYKLDELKDDFKNVLDVVYNRPVEEINNRFIENNKVNIQILGSVYKNTDIAELVRSYYEFLITKKYKNMGFSIKKLRESMLEGKGYADKEYDSVRNKLYQMTDFILYTGYINEDSDRADDLVNTLRSSLKEDDKTTVYCKEADYLWKKYRESIREVADALDGDNIKKLSKSNIEIQEDKLRKCFISYADSVSEFTKLIYLLTRFLSGKEINDLVTTLINKFDNIRSFLEIMDELGLDRTFTAEYSFFEGSTKYLAELVELNSFVKSCSFDINAKRTMYRDALDILGIESDKTEEDIEKMIDNILQIDANGDKKLKKNNGLRNFIASNVIDSNRFKYLVRYGNPKKIRETAKCKPAVRFVLNEIPDAQIERYYEACCPKNTALCSANKRREKLADMIAEIKFENFSDAGNYQKANVTSRTSEAEIKRKNQAIIRLYLTVMYIMLKNLVNVNARYVIAFHCVERDTKLYAESGLEVGNIEKNKTNLTMAVMGVKLENGIIKTEFDKSFAENAANRYLRNARWYKLILDNLKKSERAVVNEFANTVCALNAIRNININIKEIKEVENYFALYHYLIQKHLENRFADKKVERDTGDFISKLEEHKTYCKDFVKAYCTPFGYNLVRYKNLTIDGLFDKNYPGKDDSDEQK

SEQ ID NO: 3 - protein, 919 aa, Artificial Sequence
  Uncultured Ruminococcus sp. nCas1
MAKKNKMKPRELREAQKKARQLKAAEINNNAAPAIAAMPAAEVIAPAAEKKKSSVKAAGMKSILVSENKMYITSFGKGNSAVLEYEVDNNDYNQTQLSSKDNSNIQLGGVNEVNITFSSKHGFESGVEINTSNPTHRSGESSPVRGDMLGLKSELEKRFFGKTFDDNIHIQLIYNILDIEKILAVYVTNIVYALNNMLGVKGSESHDDFIGYLSTNNIYDVFIDPDNSSLSDDKKANVRKSLSKFNALLKTKRLGYFGLEEPKTKDNRVSQAYKKRVYHMLAIVGQIRQCVFHDKSGAKRFDLYSFINNIDPEYRDTLDYLVEERLKSINKDFIEDNKVNISLLIDMMKGYEADDIIRLYYDFIVLKSQKNLGFSIKKLREKMLDEYGFRFKDKQYDSVRSKMYKLMDFLLFCNYYRNDIAAGESLVRKLRFSMTDDEKEGIYADEAAKLWGKFRNDFENIADHMNGDVIKELGKADMDFDEKILDSEKKNASDLLYFSKMIYMLTYFLDGKEINDLLTTLISKFDNIKEFLKIMKSSAVDVECELTAGYKLFNDSQRITNELFIVKNIASMRKPAASAKLTMFRDALTILGIDDKITDDRISGILKLKEKGKGIHGLRNFITNNVIESSRFVYLIKYANAQKIREVAKNEKVVMFVLGGIPDTQIERYYKSCVEFPDMNSSLGVKRSELARMIKNISFDDFKNVKQQAKGRENVAKERAKAVIGLYLTVMYLLVKNLVNVNARYVIAIHCLERDFGLYKEIIPELASKNLKNDYRILSQTLCELCDKSPNLFLKKNERLRKCVEVDINNADSSMTRKYRNCIAHLTVVRELKEYIGDICTVDSYFSIYHYVMQRCITKRENDTKQEEKIKYEDDLLKNHGYTKDFVKALNSPFGYNIPRFKNLSIEQLFDRNEYLTEK

SEQ ID NO: 4 - protein, 919 aa, Artificial Sequence
  Uncultured Ruminococcus sp. nCas1 HEPN-/-
MAKKNKMKPRELREAQKKARQLKAAEINNNAAPAIAAMPAAEVIAPAAEKKKSSVKAAGMKSILVSENKMYITSFGKGNSAVLEYEVDNNDYNQTQLSSKDNSNIQLGGVNEVNITFSSKHGFESGVEINTSNPTHRSGESSPVRGDMLGLKSELEKRFFGKTFDDNIHIQLIYNILDIEKILAVYVTNIVYALNNMLGVKGSESHDDFIGYLSTNNIYDVFIDPDNSSLSDDKKANVRKSLSKFNALLKTKRLGYFGLEEPKTKDNRVSQAYKKRVYHMLAIVGQIAQCVFADKSGAKRFDLYSFINNIDPEYRDTLDYLVEERLKSINKDFIEDNKVNISLLIDMMKGYEADDIIRLYYDFIVLKSQKNLGFSIKKLREKMLDEYGFRFKDKQYDSVRSKMYKLMDFLLFCNYYRNDIAAGESLVRKLRFSMTDDEKEGIYADEAAKLWGKFRNDFENIADHMNGDVIKELGKADMDFDEKILDSEKKNASDLLYFSKMIYMLTYFLDGKEINDLLTTLISKFDNIKEFLKIMKSSAVDVECELTAGYKLFNDSQRITNELFIVKNIASMRKPAASAKLTMFRDALTILGIDDKITDDRISGILKLKEKGKGIHGLRNFITNNVIESSRFVYLIKYANAQKIREVAKNEKVVMFVLGGIPDTQIERYYKSCVEFPDMNSSLGVKRSELARMIKNISFDDFKNVKQQAKGRENVAKERAKAVIGLYLTVMYLLVKNLVNVNARYVIAIHCLERDFGLYKEIIPELASKNLKNDYRILSQTLCELCDKSPNLFLKKNERLRKCVEVDINNADSSMTRKYANCIAALTVVRELKEYIGDICTVDSYFSIYHYVMQRCITKRENDTKQEEKIKYEDDLLKNHGYTKDFVKALNSPFGYNIPRFKNLSIEQLFDRNEYLTEK

SEQ ID NO: 5 - protein, 408 aa, Artificial Sequence
  Gut metagenome contig2791000549
MKQNDRENNNKIKKSAAKAVGVKSLARLSDGSTVVSSFGKGAAAELESLITGGEIRKLSDKAILEITDDTQNKNAYNVKSSRIPNLTARTDKLSDKSGMDDLGFKRELELEVFGQCFDDSIHIQIAHAVFDIQKSLAAVIPNVLYTLNNLDRSYSTDNTSDKKDIIGNTLNYQHSYESFNVEKRGEFTEYYNAAKDRFSYFPDILCVLEKVNGKDRYQPKSEKDAFNVLSSVNMLRNSLFHFAPKSNDGKARIAVFKNQFDSDFSHITSTVNKIYSAKIAGVNENFLNNEGNNLYIILKATNWDIKKIVPQLYRFSVLKSDKNMGFNMRKLREFAVESKNIDLSRLNDKFLTNNRKKLYKVIDFIIYYHLNKVLKDSFVDDFVAALRASQSEEEKEKLYAQYSERLFA

SEQ ID NO: 6 - protein, 295 aa, Artificial Sequence
  Gut metagenome contig855000317
TDNPLHGAGGIARDHSDLIHARKALEMRYYGQTFEDNIHIQLIYNILDIEKILSVHINNIVYTLNNLLRPLTDNNFDFIGELSTYRDYEKFLEVSEIEYIIDENGEEKQNKEYTKRKLFFRLCYMPQLRYFNIIVEGPHEPVVQVENPELLKKIEASRISDRAKTVTFNEKEFYNVLIALGTLRQMEAHGNPLINIYQFDKKQNVYSTLTKKYKERVITLDNGFLSRAKKNLIILFRAYGIEDAEEKKQYIRNYYDFTVRKNYKNQGFSIKTLREHITTDIEEAIQLRSTAFDSV

SEQ ID NO: 7 - protein, 159 aa, Artificial Sequence
  Gut metagenome contig3389000027
PEKAAFTVHNDCEAFFEIDGRVQRAVADNPLHKYEKDDHGQDRISREKLEMRYYGRTFEDNIHIQVIYNILDIEKIMSIHINNIIFTINNLLRREEEDFSDLIGYITLCEKYEDLSKKGREEIRDSFDRLCKAPQLAYYNFQIEKKGKKDPNAIILTEK

SEQ ID NO: 8 - protein, 108 aa, Artificial Sequence
  Gut metagenome contig8061000170
EVTGRGQGATADNPLYKYSQKKAWDRQDRISKDKLELRYYGQTFEDNIHIQTIYNILDIEKILSIHINNIVFTINNLLRNDNDEQDDIVGYISLCKKYADLSKEKNAE

SEQ ID NO: 9 - protein, 237 aa, Artificial Sequence
  Gut metagenome contig1509000299
MKSTFVLGENNLLMTSFGKGNKAVVEKQIRDQQITDLSDPSAFTVKQDKDLHFNIDGRVRGASTDNPFHHNPEKTAQPPVRDDLIHARSFLEKRYYGENFTDNIHIQCIYSILDVEKILVSHINNIVYMLNNFLREEGETLTDLIGYLSIFKSYEGLMNSTRNDAAEMRRHFFSLCQAKQLGYLNLEVLKPQPDKPKQGKKKPADPNTIKLTEEEFFNVLLALSNMRQMLVHGNAKQ

SEQ ID NO: 10 - protein, 214 aa, Artificial Sequence
  Gut metagenome contig9549000591
KAKLEKRYFGQTFEDNIHIQVIYNMLDIEKILTIHVNNIVFTINNFLREEGEDLTDIVGYITKYKSLAKFKENKNAREYYELFCKLCDAKQLGYLNLEYNSVRSKLYKLFDFILVHHYKNDSSPESTALKNLLRTCLTDEEKEKVYVQTAKELTALYSYHFKEASVSVNARNIKEYQEKAQVYHISIADKISSTGIGLFSQLIYMLTLLLDGKE

SEQ ID NO: 11 - protein, 422 aa, Artificial Sequence
  Gut metagenome contig71000500
MKKQKSKKTVSKTSGLKEALSVQGTVIMTSFGKGNMANLSYKIPSSQKPQNLNSSAGLKNVEVSGKKIKFQGRHPKIATTDNPLFKPQPGMDLLCLKDKLEMHYFGKTFDDNIHIQLIYQILDIEKILAVHVNNIVFTLDNVLHPQKEELTEDFIGAGGWRINLDYQTLRGQTNKYDRFKNYIKRKELLYFGEAFYHENERRYEEDIFAILTLLSALRQFCFHSDLSSDESDHVNSFWLYQLEDQLSDEFKETLSILWEEVTERIDSEFLKTNTVNLHILCHVFPKESKETIVRAYYEFLIKKSFKNMGFSIKKLREIMLEQSDLKSFKEDKYNSVRAKLYKLFDFIITYYYDHHAFEKEALVSSLRSSLTEENKEEIYIKTARTLASALGADFKKAAADVNAKNIRDYQKKANDYRISFED

SEQ ID NO: 12 - protein, 49 aa, Artificial Sequence
  Cas13d sequence from human gut metagenome
IKIGNTGIGYFSELIYMLTLLLDGKEINDLLTTLINKFDNIISFIDILK

SEQ ID NO: 13 - protein, 148 aa, Artificial Sequence
  Gut metagenome contig3915000357
MKDKLEQWYFDKTFDDNIHIQLIYQIQDIEKILASHVNNIVFALDNILHATESETGDFLGMGYMRATNTFEEYRDSAISNVKKSYETFETYIKKKELLYFGEAFYHGNTCRKPEDIYHILAMVSSLRQFCFHSTFDDKSKSIKGSWLY

SEQ ID NO: 14 - protein, 137 aa, Artificial Sequence
  Gut metagenome contig4719000173
KNVITSRSFYYLVRYAKPTAVRKLMSNPKIVRYVLKRLPENQVASYYSAIWTQSESNSNETVKLIEMIDRLTTEIAGFSFAVLKDKKDSIVSASRESRAVNLEVERLKKLTTLYMSIAYIAVKSLVKVNARYFIAYS

SEQ ID NO: 15 - protein, 95 aa, Artificial Sequence
  Gut metagenome contig6929000468
MKTIKKSSKAYGLKSTFAYNDDVYMTSFGKGNDFVMEKLIYPNDNVEDLSDNPKFDVEVENKDITLKYKKSEINVNNPAKSGIKQDYLMLKDKLE

SEQ ID NO: 16 - protein, 114 aa, Artificial Sequence
  Gut metagenome contig7367000486
NRLKTKADLERLFSNRRIGYFGQAFYESDKQQRNEMEIYDNLALIGSLRQWAVHGNKTNDPAWLYKLESLPDEFKSVLDKVYAETVRKVNYKFIKTNAVNLQILQELYPKESFA

SEQ ID NO: 17 - protein, 107 aa, Artificial Sequence
  Gut metagenome contig7930000403
YAKIIIGEITSKYNKFDDIINLVYREIRNRNNTINFKNEIKNISTITNYSYFTKFIYFITKFLDGKEINELLTSLINKFDNIQAFNDILLEKLQDKNESKFAIFNGK

SEQ ID NO: 18 - protein, 282 aa, Artificial Sequence
  Gut metagenome contig993000527
NIDSLTAVYKGVNNQNRVEFGDKYDMFNKAGEICESLRSINSFARMESPAPAAKRTMFVDAIRMFGFADVSDNDAEKFYKENIEPFIYDRNGDIEDEWKKGKLVHKKDEKKKGVYNFIATNVIESNRFQYLVRYANTEKIAALARNETIVRFVIKKLPAAQIVRYYIACNRIRENINSNVLTSDDMAESLVKLVTGMDFGKIKGVRNDDRSGDKEMKKAIVTLYLTILYHLTKNLVYVNSRYFMAFHCLERDMNLFGEGQKQALRNTGDYPADNADLRRSDI

SEQ ID NO: 19 - protein, 118 aa, Artificial Sequence
  Gut metagenome contig6552000639
AVDLNPDDPAFNVNEVTEERFILDHGRIKGCIATADNPLHASSAPQDMLLLKSVLEERFFGMSFPEDNVHIQLIYNILDIEKILTVYSTNAVYAINNLFRADDQEDDEFIGDLSVDTS

SEQ ID NO: 20 - protein, 87 aa, Artificial Sequence
  Gut metagenome contig11932000246
RIVNSFAHMKKESMSAKKIMFDEALIVLGIDDAEKERELDQMLDKDARKQNPQRAGLRNFIANNVIESDRFKYLVRYGNVKRIKGIA

SEQ ID NO: 21 - protein, 85 aa, Artificial Sequence
  Gut metagenome contig12963000286
EKETELNLMLDKDARKQNRQKAGLRNFIANNVIESERFKYLVRYGNVKRIKGLSTNSQVMGFVLKDIADAQIVRYYRSIYGDDNC

SEQ ID NO: 22 - protein, 155 aa, Artificial Sequence
  Gut metagenome contig2952000470
IRLPNGTIMDECDVSKATTVKNRYLHNKKWYSLAFTNYKNSDSDVIVNFRNSVAHLNAIRNIDEYIDGIGEINSHTGYFEIYHYIIQKRMQAVTTDKSKLQPKTEEYFENLSKYHTYCKDFVKAYCVPMAYNLPRYKNLTIDGQFDRNIHTETKE

SEQ ID NO: 23 - protein, 406 aa, Artificial Sequence
  Gut metagenome contig451000394
LQELYPKESFASIVKEYYGFLVTKKYKNIGFSIKHLREILLDSTDYRDKEYDSVRHKLYQLLDFCIYHGYLYEDAEFAADLVNQLRASLSELDKEKIYNIEAARLADKLGSSLFSYLRRSVVGKNIQQLKKNAENLEKVKLEDIQISSGKTVSYFTKLMYLLTLFLDGKEINDLLTTLINKFDNIRVFNKTLTQLNQSTEFVEDYSFFGSSGTVFEELTVLNSFARMSRIDPSARKDMYRDAIEILGISMEMSHEKFEEMLDRILCYDEEGNPIINPDGTKKSGMRNFIATNIISSNRFKYLVRYGNATKIRALANCENAVKFVLSTIPDEQIVRYFDSCREPTDHIENNIERKREYLASIIKEMSFERFRDAEKLQRYHVDRPTNGSSVEGEQKQRYQAVIRLYL

SEQ ID NO: 24 - protein, 954 aa, Artificial Sequence; identical to SEQ ID NO: 1
  Eubacterium siraeum DSM 15702

SEQ ID NO: 25 - protein, 173 aa, Artificial Sequence
  gut metagenome P19E0k2120140920, c369000003
DGKEINDLVTTLINKTENIASFNEVLKQLGYELDYSEEYSVFAASDEMASQLRALNSFARMEKPDASAKRIMFVEAARMLGDDSSYEELKAYFDDILAKKSKKEFDAATDNEAIRATDKKKKGFRNFIINNVIESDRFKYLIRYCNVESVQAFSKNRKLVKFVLKDIPESQIL

SEQ ID NO: 26 - protein, 111 aa, Artificial Sequence
  Gut metagenome contig7593000362
RMSEEAPSAKKVMYVEAAKVLGYSEPEEDLETYIEGILDKKKNVDASGKKNMNFRNFIANNVIESRRFKYLVRYCNPEKIRAMAENRKVVSFVLKGIPDAQIRAYYNSCNG

SEQ ID NO: 27 - protein, 86 aa, Artificial Sequence
  Gut metagenome contig12619000055
KLNAGFADKAKTDMQVLLDVLKIKGQEKEIEIAQNYYEFIVKKGYKNEGFSIKKLRQKLTSLSESEKEPLNSMRYDSVRPKLNHLL

SEQ ID NO: 28 - protein, 236 aa, Artificial Sequence
  Gut metagenome contig1405000151
KELFQKLCKAPQLAYFNLQIETEGKRKADPNAIKLTQEDFFSILYTLGYMRQMLMHGAPNQNIYKMDPLKDKTFKNCLDCLNRLYNERVMALNNNFLDLAKKNLSILFDVFAVKTQEEKAEYVRDYYDFVVRKQFKNQGFSIKCLREHMTDDIEEAGTLRDQKYDSVRGKLYPFINFAIFRYYNSHSSEAEALVERLRASMNEEEKDKVYRHEAVILWSKIRNLVLKHILPEMEGS

SEQ ID NO: 29 - protein, 103 aa, Artificial Sequence
  Chicken gut metagenome c298474
SDHDKKALVQEYYEFVVLKNYKNLGFSIRRLRDTIIARETGADILSDTEYDTVRSKLYRAMDFKIYLYYQEHPEKAKTLIECLRASTEEAEKEWIYRREASAV

SEQ ID NO: 30 - protein, 225 aa, Artificial Sequence
  Gut metagenome contig1516000227
NKFDGESCKSFPLLMYLLCKFLDAKEVNELLTSIINKLENIESLIDALVTLNKWDGFSSNYSLFDKQNIRSLINDFRLVKNLSSSKRKLKKAKQYEYQKNKQLYADAINLFKKDNFVHLNDEEGTGLDLYLSTLLTKKSGNRGDKVKNFIESAIIKNRRFVYLIRYADPEKCYKLVHNEKMLRFVLGEYNEEMMPLSQLQKYYNAVTENNDSNCENRNKMIDTLV

SEQ ID NO: 31 - protein, 210 aa, Artificial Sequence
  Gut metagenome contig1838000319
LEYQITPENDVVKLPVSNSSSITVNSANDNIFEVTTSRSDLKDLEAKPSNPTKKSKSSEKSPRQDMLGLKSALEKEYFGKEFNDNIHIQIIHCIQDIEKILAVYSTNANYALVNLLGHNFKDESGKREDFLGSDAFKIEMSYESFSAPANETKLSSEKERTRENEEKRLKYLEDFNNMTDPDNYDKRLGYFGEAFFKPSKNRGKDTVADT

SEQ ID NO: 32 - protein, 84 aa, Artificial Sequence
  Gut metagenome contig13123000268
SPKDAGLAYRPAGVRPDQIGAKAALEKRYFGKETPGDNIHVQIAYQIQDIEKLLAVYISNIIYAVNNVTGVSAMKDSKGRPVDL

SEQ ID NO: 33 - protein, 115 aa, Artificial Sequence
  Gut metagenome contig5294000434
DKVVHVNVAQGIRDFIEDFKSNSDFSMNSYFELYNYLMQRMLVNEYTKKANDFKVEVPELLITYKNNLDKYKTYDRNFLHIINMPFAYNLARYKNLTIEDIFYDNYKDKLKTKRG

SEQ ID NO: 34 - protein, 377 aa, Artificial Sequence
  Gut metagenome contig6415000192
VNSDASDFCKLIYVFTRFLDGKEINILLNSLIKKFQDIHSFNTTVKKLSENNLIINADYVDDYSLFEQSGTVARELMLIKSISKMDFGLDNINLSFMYDDALRTLGVSDENLPEVKREYFGKTKNLSAYIRNNVLENRRFKYVIKYIHPSDVQKIACNKAIAGFVLNRMPDTQIKRYYDSLINKGATDIQAQAKALLDCITGISFDAIKDDKHLHKSKEKSPQRSADRERKKAMLTLYYTIVYIFVKQMLHINSLYTIGFFYLERDQRFIYSRAKKENKNPSKNSYLNDFRSVTAYFIPSEIMKRIEKNENKGFLEDFEALWNSCGKTSRLRKEDVLLYARYISPDHALKNYKMILNSYRNKIAHINVIMSAGKYTG

SEQ ID NO: 35 - protein, 123 aa, Artificial Sequence
  Gut metagenome contig6144000300
NKDILKLVIQELPETQILRYYSTIGKNKTTSIDEMKQCLIDAIYNFNIDDTLNAIGDSRVINEKKEQSKAIINLYLTVIYLVTKNMVKINTRFSIAFACLERDYYLHFGQPNGKLLYLQLTEE

SEQ ID NO: 36 - protein, 101 aa, Artificial Sequence
  Gut metagenome contig9118000041
DTDCDTQYELFNGDNPGKLANELRICKSLSRMKPEMDEIKKPLYKDALNILNIGNEEFDENTFEFLNREKGDHKLRNFIVNNVIESTRFMYVVKYMNPSNC

SEQ ID NO: 37 - protein, 331 aa, Artificial Sequence
  Activated sludge metagenome transcript 124486
MVKTKAEIHQILRFLGTIRQCLAHKKDAKWDIIFNPDSMSNEFKTLIDSYYNGRVKALNDDFIKHNRSSSLPILFHYYGATEENRRAELTEGFYDFIIKRENKNMGFSLKKIREKMLEKQEASFIKEDGYNSVRHKLYILMDFIIYKTYAADIELQESIVATLRSNLTDEDKEATYEIQAKALWNKIGDDIVKKLMPLIDGNKIKGYKDEKIEIKKEWLKDVMISTENASYMTKMVYFMTLFLDGKEINEFLTVLINKFENIQGFFDVLGHNALAEKIEEPKEISKRPLKGFAELAAFTQKSTDVGLTEHLRLFENSVNISDEIRVTKNFA

SEQ ID NO: 38 - protein, 245 aa, Artificial Sequence
  Gut metagenome contig1322000437
INELLTTLINKFDDIQSLMDIATSKQVNVPCKFTSDYSIFNNSSRIVKELNVVKNVARMQKPTASVKTDMLMDALTLLGTDDTMDSEKLRNYVRVQIMKLDAEGKTSKSDDHTLRNFLINNVINSSRFIYVIKYVKADTAYALGHNRKAVAYVLHRIPEQQIDRYYSSCIDRDAGNRMEKENALVDMIVKLSFRDIENVSNDNEKASEKQRYRAVVGLYLTVIYELVKNIVNINSRYVIAFHSLE

SEQ ID NO: 39 - protein, 139 aa, Artificial Sequence
  Gut metagenome contig4582000531
SNDHALRNFIVNNVISSSRFTYIIKFINANIAYKIGHNRKAVSYVIKKLPPDQIDRYFTSCIGQESKQAEISDKRQALIDMITTLDYYRFTDINNEDIQKKEQYKAIIGLYLTVVYRLVKNIVNINSRYVIAFHCLERD

SEQ ID NO: 40 - protein, 100 aa, Artificial Sequence
  Gut metagenome contig9190000283
FVLNSIPDLQLDRYYKAITGKSDGNRVEKTDIIMDKLMKLDFNQLKVNEDQMGKKNIYFVEKLKALVGLYLTIIYLLTKSLVKINSIYILAFSCFERDYR

SEQ ID NO: 41 - protein, 213 aa, Artificial Sequence
  Gut metagenome contig1709000510
PKFKSGSHAQKYYGFIIFKSHKNLGFSIKELRKKLFDIEDAKAFSKKQYDSVRFKMNKLIDFFITYHYTTIDKKQADKLVSKLRYSIDEKEKDDIYTTEAEDLWNKYKSSFEQIRAYVSPDIITEYEHQATNFEYEIKKFDPSTELKTFFSKMIYVLCMFLDGKEINELLSTLINKFDNIDSFITTSEGITDECRFTGTGEKKNIYDIFNASG

SEQ ID NO: 42 - protein, 946 aa, Artificial Sequence
  M24 (LSQX01212483 Anaerobic digester metagenome)
MNNKRKTKAKAAGLKSVFFDQKQAVLTTFAKGNNSQIEKKVVNSEVKDLRQPPAFDLELKEKTFYISGKNNINTSRENPLASASLPLSKRQRIRAERIKRAREENRPYHNVKRVGEDDLRAKADLEKHYFGKEYSDNLKIQIIYNILDINKIISPYINDIVYSMNNLARNDEYIDGKIDVIGSLSSTTDYSSFMSPNKDLEKEKKFSFHRENYKKFVEASKPYMRYYGKVFIRDVKKSKLSTGKGEKIEVMYRSDEEIFTIFQILSYVRQSIMHNDIGNKSSILAIEKYPARFVGFLSDLLKTKTNDVNRMFIDNNSQTNFWVLFSIFGLQDHTSGADKICRNFYDFVIKADSKNLGFSLKKIRELMLDLPNANMLRDHQFDTVRSKFYTLLDFIIYQHYLEEKSRIDNMVEKLRMTLKEEEKEVLYAAEAKIVWNAIGAKVINKLVPMMNGDALKEIKRKNRDRKLPQSVIATVQVNSDANVFSGLIYFLTLFLDGKEINEMVSNLITKFENIDSLLHVDREIYKSDEKDLDLEIEKLALFFKGVVRPNAKTDTGAGEISKSFSIFQSAERIIEELKFIKNVTRMDNEIFPSEGVFLDAANVLGVRGDDFDFSNEFVGDDLHSDANKKIINKINGTKEDRNLRNFIINNVVKSRRFQYIARHMNTHYVKQLANNETLNRFVLNKMGDAKIINRYYESISGNTPNIEVRSQIDYLVKRLRSFSFEDLNDVKQKVRPGTNESIEKEKKKALVGLCLTIQYLVYKNLVNINARYTTAFYCLERDSKLKGFGVDVWRDFESYTALTNHFIKEGYLPVRKAEILRANLKHLDCEDGFKYYRNQVTHLNAIRVAYKYINEIKSVHSYFALYHYIMQRHLYDSLQAKAKDSSGFVIDALKKSFEHKIYSKDLLHVLHSPFGYNTARYKNLSIEALFDKNESRPEVNPLSTND

SEQ ID NO: 43 - protein, 150 aa, Artificial Sequence
  Gut metagenome contig3833000494
EEASDFKDKKNDSDRRKLYKLMDFCIFYLYYSDSKRNEDLVSRLRESLTDENKDIIYSKEAKTVWNELRKKFSTILDNVKGANIKKLEDVKEKFISEDEFDDIKLDIDISYFSKLMYVMCYFLDGKKINDLLTTLVSKFDNIGSIIEAAK

SEQ ID NO: 44 - protein, 123 aa, Artificial Sequence
  Activated sludge metagenome transcript 117355
MEKMEKIRKSENRKSRAKAAGLKSTFVVADKLALTSFGKGNKANLEKIIKNEEVEEINKPPKFDAKVEEKQIHIIGKTIKDGITEKPAGMRNDLIGAKQELEKMFFGKTFDDNIHIQLIYNIL

SEQ ID NO: 45 - protein, 84 aa, Artificial Sequence
  Gut metagenome contig11061000330
SQRDSTINPGEKQISVEKLNPKMVQYAKAVINHGTYCKDAVKALCVPFAYQLVRYKNLTIDGLFDKNHPGDKKEAKTLALDDDV

SEQ ID NO: 46 - protein, 418 aa, Artificial Sequence
  Gut metagenome contig338000322
FDNIISFIDILKKLNLEFKFKPEYADFFNMTNCRYTLEELRVINSIARMQKPSADARKIMYRDALRILGMDNRPDEEIDRELERTMPVGADGKFIKGKQGFRNFIASNVIESSRFHYLVRYNNPHKTRTLVKNPNVVKFVLEGIPETQIKRYFDVCKGQEIPPTSDKSAQIDVLARIISSVDYKIFEDVPQSAKINKDDPSRNFSDALKKQRYQAIVSLYLTVMYLITKNLVYVNSRYVIAFHCLERDAFLHGVTLPKMNKKIVYSQLTTHLLTDKNYTTYGHLKNQKGHRKWYVLVKNNLQNSDITAVSSFRNIVAHISVVRNSNEYISGIGELHSYFELYHYLVQSMIAKNNWYDTSHQPKTAEYLNNLKKHHTYCKDFVKAYCIPFGYVVPRYKNLTINELFDRNNPNPEPKEEV

SEQ ID NO: 47 - protein, 418 aa, Artificial Sequence; identical to SEQ ID NO: 46
  Cas13d sequence from human gut metagenome

SEQ ID NO: 48 - protein, 109 aa, Artificial Sequence
  Gut metagenome contig9530000097
KSKHYRQCVKEDLLNARKLHTDDYNIDAIRAFRNAVAHLDVVRNMSAYIEGIREINSYYGLYHYLAQRCLQKRCNGALDDNTDYFRTLDKYNTYVKDFVKALCVPFAYN

SEQ ID NO: 49 - protein, 213 aa, Artificial Sequence
  Gut metagenome contig1750000258
STPDKARESLRDMLHNISFNDFADVKQDDRRATPEEKVEKERYKAIIGLYLTVMYHLVKNLVYVNSRYVMAFHCLERDAMHYDVCLDNYRDLIRHLISDGDSSCNHFISHNKRMRGCIEEDVNNSEQLIFGKEDAVIRFRNNVAHLSAIRNANEYIDDIREITSYFALYHYLMQRKLIDDCKVNDTAHKYFEKLTKYKTYVMDMVKALCSPFG

SEQ ID NO: 50 - protein, 131 aa, Artificial Sequence
  Gut metagenome contig5377000274
KENDILKKSRKKSSVKANGLKSVFVMENKALMTSFGKGNKANPEKELVGGEIRELTDSPVFDASNLGNIIEISRRGVRIEKKGYIASDYEIHKDVINAKDKLEERYFGSAMDDNIHIQMVYQILDIEKILS

SEQ ID NO: 51 - protein, 255 aa, Artificial Sequence
  gut metagenome P19E0k2120140920 c248000089
YSADMIDELAGIIHDMKFKQFENVDQSAKRGTPEAADKQQKQNVIRLYLTVCYLFFKNLIYVNSRYFLAFYCLERDVKLWGKTPKFGSREEDTSYTVLTREFMDSGKISTKSKSKNGAESPDEAAKHIPRNYIQKNLDNSDDVAIRYFRNAAEHINALQCAANYLENVEDTESYYRIYHYIMQRYIMQSYSQDKSGGKYDKADARDINDKTKEYFELVENHNTYCKDFVKALCVPFAYNLARFKNLSIDGLFDKN

SEQ ID NO: 52 - protein, 89 aa, Artificial Sequence
  Gut metagenome contig11400000031
NIVKHVLKDIPDTQIERYYKSYFNTENAANAEIMREKLASALMQVKYDEFKNVKQKVKNGTEEAFEKERKKALVRLYLTVVYIFVKNLV

SEQ ID NO: 53 - protein, 109 aa, Artificial Sequence
  Gut metagenome contig7940000191
NHIDHLNAVRNADKYLNDVRQVTSWYELFHYIVQRALFDDYLKALSYNPDAGKELNPRTLEYFAKVQKYGTCCKDFIKALNVPFAYNLPRYKNLSIDGLFDMNRPGEKG

SEQ ID NO: 54 - protein, 124 aa, Artificial Sequence
  Gut metagenome contig6049000251
LYLTSFGKGNAAVIEQKIEPENGYRVTGMQITPSITVNKATDESVRFRVKRKIAQKDEFIADNPMHEGRHRIEPSAGSDMLGLKTKLEKYYFGKEFDDNLHIQIIYNILDIEKILAVYSTNITA

SEQ ID NO: 55 - protein, 233 aa, Artificial Sequence
  Gut metagenome contig1137000500
MKKKKNLREQREAKKQERLAACSAKTKAAEIPAAEKPVATTPIAEPVKTDSKKKSSVKAAGLKSTLVLDNKLYTTSFGKGNEAVIEQEVNTADYTVANVNSTPSLEIRSAGDKELSFSSHRQFVNKDELSAVNPLYGGKDKPRKPAGKDMLGLKDKLEERYFGKSFNDNIHIQIIYNILDIEKILAVYATNITVALDHMIDKDVNIEKEDFIGYMNTLNTYEVFMDPSKNPKL

SEQ ID NO: 56 - protein, 69 aa, Artificial Sequence
  Gut metagenome contig9368000105
QRHVAEGVEPNRHDFAERFPYYAALYQYHSYVKDFVKALNAPFGYNIPRFKNLTIEELFDRNIHIETYV

SEQ ID NO: 57 - protein, 358 aa, Artificial Sequence
  Gut metagenome contig546000275
MDSYRPKLYKLIDFCIFKHYHEYTEISEKNVDTLRAAVSEEQKESFYADEAKRLWGIFDKQFLGFCKKINVWVNGSHEKEILGYIDKDAYRKKSDVSYFSKFLYAMSFFLDGKEINDLLTTLINKFDNIASFISTAKELDAEIDRILEKKLDPVTGKPLKGKNSFRNFIANNVIENKRFIYVIKFCNPKNVLKLVKNTKVTEFVLKRMPESQIDRYYSSCIDTEKNPSVDKKISDLAEMIKKIAFDDFRNVRQKTRTREESLEKERFKAVIGLYLTVVYLLIKNLVNVNSRYVMAFHCLERDAKLYGINIGKNYIELTEDLCRENENSRSAYLARNKRLRDCVKQNIDNAKNMKSKEK

SEQ ID NO: 58 - protein, 114 aa, Artificial Sequence
  Gut metagenome contig7216000573
KEMIYANEATFLWDKLGRTFLNFCDNIGAWVKNDHTEEIETYIDKDAYKTSSKVSYFSKLLYAMCFFLDGKEINDLLTTLINKFDNIGSFIETAKELGLSVTFIKDYAFFNASK

SEQ ID NO: 59 - protein, 136 aa, Artificial Sequence
  Gut metagenome contig4806000409
LIDSKRLRYFGFEYDPDGKNKNEEMKKRLYHLVAFAGQLRQWSFHSEGNFQLEWLYKLDDSRIAQEYRDTLDYFFDRRFDELNNNFVEQNATNLFILKETFPGEDLKAVTDLYYDFIIVKSQKNIGFSIKKLREKM

SEQ ID NO: 60 - protein, 94 aa, Artificial Sequence
  Gut metagenome contig10762000480
CFDTELNPMTEIKIQNLAQKMKDMDFTNFRDVQQKSRDPEKNREKERFKAIIGLYLTVVYRLVKNLADVNARYVMAFHSLERDSSLYNEPVVWK

SEQ ID NO: 61 - protein, 149 aa, Artificial Sequence
  Gut metagenome contig4114000374
DTKINPQTWLYQLENTPDLDNEYRDTLDHFFDERFNEINEHFVTQNATNLCIMKEVFPDEDFKSIADLYYDFIVVKSYKNIGFSIKKLREKMLELPEAKRVTSTEMDSVRSKLYKLIDFCIFKHYHEKPETVEMIVSMLRAYTSEDMKE

SEQ ID NO: 62 - protein, 933 aa, Artificial Sequence
  Ruminococcus flavefaciens FD1
MKKKMSLREKREAEKQAKKAAYSAASKNTDSKPAEKKAETPKPAEIISDNSRNKTAVKAAGLKSTIISGDKLYMTSFGKGNAAVIEQKIDINDYSFSAMKDTPSLEVDKAESKEISFSSHHPFVKNDKLTTYNPLYGGKDNPEKPVGRDMLGLKDKLEERYFGCTFNDNLHIQIIYNILDIEKILAVHSANITTALDHMVDEDDEKYLNSDYIGYMNTINTYDVFMDPSKNSSLSPKDRKNIDNSRAKFEKLLSTKRLGYFGFDYDANGKDKKKNEEIKKRLYHLTAFAGQLRQWSFHSAGNYPRTWLYKLDSLDKEYLDTLDHYFDKRFNDINDDFVTKNATNLYILKEVFPEANFKDIADLYYDFIVIKSHKNMGFSIKKLREKMLECDGADRIKEQDMDSVRSKLYKLIDFCIFKYYHEFPELSEKNVDILRAAVSDTKKDNLYSDEAARLWSIFKEKFLGFCDKIVVWVTGEHEKDITSVIDKDAYRNRSNVSYFSKLMYAMCFFLDGKEINDLLTTLINKFDNIANQIKTAKELGINTAFVKNYDFFNHSEKYVDELNIVKNIARMKKPSSNAKKAMYHDALTILGIPEDMDEKALDEELDLILEKKTDPVTGKPLKGKNPLRNFIANNVIENSRFIYLIKFCNPENVRKIVNNTKVTEFVLKRIPDAQIERYYKSCTDSEMNPPTEKKITELAGKLKDMNFGNFRNVRQSAKENMEKERFKAVIGLYLTVVYRVVKNLVDVNSRYIMAFHSLERDSQLYNVSVDNDYLALTDTLVKEGDNSRSRYLAGNKRLRDCVKQDIDNAKKWFVSDKYNSITKYRNNVAHLTAVRNCAEFIGDITKIDSYFALYHYLIQRQLAKGLDHERSGFDRNYPQYAPLFKWHTYVKDVVKALNAPFGYNIPRFKNLSIDALFDRNEIKKNDGEKKSDD

SEQ ID NO: 63 - protein, 70 aa, Artificial Sequence
  Gut metagenome contig7093000170
RQLAVGLDPKRSGFERNYPYFAKLFEWHTYVKDMVKALNAPFGYNIPRFKNLSIDDLFDMNEERVKDAKA

SEQ ID NO: 64 - protein, 91 aa, Artificial Sequence
  Gut metagenome contig11113000384
ASENERKAKQQAGQPAAKGNGEEKQKPILKLNPVRERKLSTTLKSRAKAAGLKSTFVINDKELLMTAFGRGNDAIPEKRILGAQVETLSEK

SEQ ID NO: 65 - protein, 119 aa, Artificial Sequence
  Gut metagenome contig6403000259
NKVKEFELDASVKYRLSKVVESVRLKDKATYFTKLIYLTTLFLDGKEINDLLTTLIHQFENIASFIDVMKDRGIADGFSGEYKFFESSKQVAFELRNVNSFARMTKASKDDDNAKQIMF

SEQ ID NO: 66 - protein, 123 aa, Artificial Sequence
  Gut metagenome contig6193000124
AEDYYDFLFKKTYKYLGFSIKTLREEFLTIKDAEKLKDKKYDSVRSKLYKVIDFLIFDLYQNRECLRINELVQRLRLSTDELTKAKIYADEAHFVYKKLWDIIDTEIVPQLDQKGIKALEEAY

SEQ ID NO: 67 - protein, 320 aa, Artificial Sequence
  Gut metagenome contig721000619
KEGSTMAKNEKKKSTAKALGLKSSFVVNNDIYMTSFGKGNKAVLEKKITENTIENKSDTTYFDVINRDPKGFTLEGRRIADMTAFSNDPKYHVNVVNGKFLEDQLGARSELEKKVFGRTFDDNVHIQLIHNILDIEKIMAQYVSDIVYLLHNTIKRDMNDDIMGYISIRNSFDDFCHPERIPDRKAKDNLQKQHDIFFDEILKCGRLAYFGNAFFEDGSDNKEIAKLKRYKEIYHIIALMGSLRQSYFHGENSDKNFQGPTWAYTLESNLTGKYKEFKDTLDKTFDERYEMISKDFGSTNMVNLQILEELLKMLYGNVSP

SEQ ID NO: 68 - protein, 220 aa, Artificial Sequence
  Gut metagenome contig1666000270
KELKFRINGKFIKNYHDRYDEDSANRRWKVVTKQNDVNLFCKLIYMMTLLLDGKEINDLLTTLVNKFDNIASFIDVMEDMGIEHRFIGGYDMFADSKKICVDLQMINSFARMQVTMKSAKKMLYRDALVILGMDQSEEEIERFMLENNIIKDNNEDKSEKKQHDFRNFLINSVINSSRFRYMVRYSSADGLRKLKKSRKLIGFVLNSLPETLIDRYYHSC

SEQ ID NO: 69 - protein, 204 aa, Artificial Sequence
  Gut metagenome contig2002000411
EKQNKAKYQAIISLYLMVMYQIVKNMIYVNSRYVIAFHCLERDSNQLLGRFNSRDASMYNKLTQKFITDKYLNDGAQGCSKKVGNYLSHNITCCSDELRKEYRNQVDHFAVVRMIGKYAADIGKFSTWFELYHYVMQRIIFDKRNPLSETERTYKQLIAKHHTYCKDLVKALNTPFGYNLARYKNLSIGELFDRNNYNAKTKET

SEQ ID NO: 70 - protein, 944 aa, Ruminococcus albus
MAKKSKGMSLREKRELEKQKRIQKAAVNSVNDTPEKTEEANVVSVNVRTSAENKHSKKSAAKALGLKSGLVIGDELYLTSFGRGNEAKLEKKISGDTVEKLGIGAFEVAERDESTLTLESGRIKDKTARPKDPRHITVDTQGKFKEDMLGIRSVLEKKIFGKTFDDNIHVQLAYNILDVEKIMAQYVSDIVYMLHNTDKTERNDNLMGYMSIRNTYKTFCDTSNLPDDTKQKVENQKREFDKIIKSGRLGYFGEAFMVNSGNSTKLRPEKEIYHIFALMASLRQSYFHGYVKDTDYQGTTWAYTLEDKLKGPSHEFRETIDKIFDEGFSKISKDFGKMNKVNLQILEQMIGELYGSIERQNLTCDYYDFIQLKKHKYLGFSIKRLRETMLETTPAECYKAECYNSERQKLYKLIDFLIYDLYYNRKPARIEEIVDKLRESVNDEEKESIYSVEAKYVYESLSKVLDKSLKNSVSGETIKDLQKRYDDETANRIWDISQHSISGNVNCFCKLIYIMTLMLDGKEINDLLTTLVNKFDNIASFIDVMDELGLEHSFTDNYKMFADSKAICLDLQFINSFARMSKIDDEKSKRQLFRDALVILDIGNKDETWINNYLDSDIFKLDKEGNKLKGARHDFRNFIANNVIKSSRFKYLVKYSSADGMIKLKTNEKLIGFVLDKLPETQIDRYYESCGLDNAVVDKKVRIEKLSGLIRDMKFDDFSGVKTSNKAGDNDKQDKAKYQAIISLYLMVLYQIVKNMIYVNSRYVIAFHCLERDFGMYGKDFGKYYQGCRKLTDHFIEEKYMKEGKLGCNKKVGRYLKNNISCCTDGLINTYRNQVDHFAVVRKIGNYAAYIKSIGSWFELYHYVIQRIVFDEYRFALNNTESNYKNSIIKHHTYCKDMVKALNTPFGYDLPRYKNLSIGDLFDRNNYLNKTKESIDANSSIDSQ

SEQ ID NO: 71 - protein, 449 aa, Artificial Sequence
  Gut metagenome contig13552000311
LIDFLIYDLYYNRKPARIEEIVDKLRESVNDEEKESIYSAETKYVYEALGKVLVRSLKKYLNGATIRDLKNRYDAKTANRIWDISEHSKSGHVNCFCKLIYMMTLMLDGKEINDLLTTLVNKFDNIASFIDVMDELGLEHSFTDNYKMFADSKAICLDLQFINSFARMSKIDDEKSKRQLFRDALVVLDIGDKNEDWIEKYLTSDIFKRDENGNKIDGEKRDFRNFIANNVIKSARFKYLVKYSSADGMIKLKKNEKLISFVLEQLPETQIDRYYESCGLDCAVADRKVRIEKLTGLIRDMRFDNFRGVNYSNDACKKDKQAKAKYQAIISLYLMVLYQIVKNMIYVNSRYVIAFHCLERDLLFFNIELDNSYQYSNCNELTEKFIKDKYMKEGALGFNMKAGRYLTKNIGNCSNELRKIYRNQVDHFAVVRKIGNYAADIASVGSWFE

SEQ ID NO: 72 - protein, 96 aa, Artificial Sequence
  Gut metagenome contig10037000527
YMDQNFANSDAWAIHVYRNKIQHLDAVRHADMYIGDIREFHSWFELYHYIIQRRIIDQYAYESTPGSSRDGSAIIDEERLNPATRRYFRLITTYKT

SEQ ID NO: 73 - protein, 519 aa, Artificial Sequence
  Gut metagenome contig238000329
RYDKDRSKIYTMMDFVIYRYYIDNNNDSIDFINKLRSSIDEKSKEKLYNEEANRLWNKLKEYMLYIKEFNGKLASRTPDRDGNISEFVESLPKIHRLLPRGQKISNFSKLMYLLTMFLDGKEINDLLTTLINKFENIQGFLDIMPEINVNAKFEPEYVFFNKSHEIAGELKLIKGFAQMGEPAATLKLEMTADAIKILGTEKEDAELIKLAESLFKDENGKLLGNKQHGMRNFIGNNVIKSKRFHYLIRYGDPAHLHKIATNKNVVRFVLGRIADMQKKQGQKGKNQIDRYYEVCVGNKDIKKTIEEKIDALTDIIVNMNYDQFEKKKAVIENQNRGKTFEEKNKYKRDNAEREKFKKIISLYLTVIYHILKNIVNVNSRYILGFHCLERDKQLYIEKYNKDKLDGFVALTKFCLGDEERYEDLKAKAQASIQALETANPKLYAKYMNYSDEEKKEEFKKQLNRERVKNARNAYLKNIKNYIMIRLQLRDQTDSSGYLCGEFRDKVAHLEVARHAHEYI

SEQ ID NO: 74 - protein, 181 aa, Artificial Sequence
  Gut metagenome contig2643000492
NGEIVSLAEKEAFSAKIADKNIGCKIENKQFRHPKGYDVIADNPIYKGSPRQDMLGLKETLEKRYFSPSDSIDNVRVQVAHNILDIEKILAEYITNAVYSFDNIAGFGKDIIGDDFSPVYTYDKFEKSDRYEYFKNLLNNSRLGYYGQAFFECDDSKENKKKKDAIKCYNIIALLSGLRHW

SEQ ID NO: 75 - protein, 440 aa, Artificial Sequence
  Gut metagenome contig874000057
MSKNKESYAKGMGLKSALVSGSKVYMTSFEGGNDAKLEKVVENSEIVSLAEKESFSAEIFKKNIGCKIENKKFKHPKRYDVIADNPLYKGSVRQDMLGLKETLEKRYFNSADGTDNVCIQVIHNILDIEKILAEYITNAVYSFDNIAGFGEDIIGMGGFKPIYTYKQFKEPDKYNKKFDDILNNSRLGYYGKAFFEKNDLKHNPNKKKRDKNPYILKYDNECYYIIALLSGLRHWNIHSHAKDDLVSYRWLYNLDSILNREYISTLNYLYDDIADELTESFSKNSSANVNYIAETLNIDPSEFAQQYFRFSIMKEQKNMGFNVSKLREIMLDRKELSDIRDNHRVFDSIRSKLYTMMDFVIYRYYIEEAAKTEAENRNLPENEKKISEKDFFVINLRGSFDENQKEKLYIEEAKRLWEKLKDIMLKIKEFRGEKVKEYKK

SEQ ID NO: 76 - protein, 137 aa, Artificial Sequence
  Gut metagenome contig4781000489
LDKQLDYEYIRTLNYMFNDIADELTRTFSKNSAANVNYIAETLNIDPNKFAEQYFRFSIMKEQKNLGFNLTKLRESMLDRRELSDIRDNHNVFDSIRPKLYTMMDFVIYKHYIDEAKKTEAENKSLPDDRKNLSEKD

SEQ ID NO: 77 - protein, 87 aa, Artificial Sequence
  Gut metagenome contig12144000352
RMGEPVANTKRVMMIDAVKILGTDLSDDELKEMADSFFKDSDGNLLKKGKHGMRNFITNNVIKNKRFHYLIRYGDPAHLHEIAKNEA

SEQ ID NO: 78 - protein, 414 aa, Artificial Sequence
  Gut metagenome contig5590000448
VHNNEEKDLIKYTWLYNLDKYLDAEYITTLNYMYNDIGDELTDSFSKNSAANINYIAETLGIDPKTFAEQYFRFSIMKEQKNLGFNLTKLREVMLDRKDMSEIRENHNDFDSIRAKVYTMMDFVIYRYYIEEAAKVNAANKSLPDNEKSLSEKDIFVISLRGSFNEDQKDRLYYDEAQRLWSKVGKLMLKIKKFRGKDTRKYKNMGTPRIRRLIPEGRDISTFSKLMYALTMFLDGKEINDLLTTLINKFDNIQSFLKVMPLIGVNAKFAEEYSFFNNSEKIADELRLIKSFARMGEPVADARRAMYIDAIRILGTDLSDDELKALADSFSLDENGNKLGKGKHGMRNFIINNVITNKRFHYLIRYGNPVHLHEIAKNEAVVKFVLGRIADIQKKQGQNGKNQIDRYYETCIGK

SEQ ID NO: 79 - protein, 109 aa, Artificial Sequence
  Gut metagenome contig9269000031
LSEKDIFVISLRGSFNEDQKDRLYYDEAQRLWSKLGKLMLKIKEFKGKDTKKYRDMGKPRLRRILPEGRDISTFSKLMYALTMFLDGKEINDLLTTLINKFDNIQSFLK

SEQ ID NO: 80 - protein, 105 aa, Artificial Sequence
  Gut metagenome contig8537000520
SARLADELRIVKSVSRMEMPMPAAKTLMFEDALKLFWIDSPEEAKKIISGDNKKIRNFIANNVVESSWFNYIVRYTDLKNARDFIRCRPIVEFVLNKVPETQIDR

SEQ ID NO: 81 - protein, 211 aa, Artificial Sequence
  Gut metagenome contig1845000130
SSLNEVEKDAIYAEEAKQAWVNIRDLVIRHILPMMKGDYIAQISVEDEKIDQSILEDVFISKITPSALAEFIYIVTLFIDGKEINDLLTQMIHKFDSIAAFQEVMRQRCMVTQFNQDYAIFEQSGKIAEDLRVVNSFARMSISKDGPNVKGAMFREALLILGLASPDETMESVLQKYMNSNLDRERKSVRNFVINNVIQSRRFHYLVRYGN

SEQ ID NO: 82 - protein, 906 aa, Artificial Sequence
  gut metagenome P13E0k2120140920 c3000072
MEREVKKPPKKSLAKAAGLKSTFVISPQEKELAMTAFGRGNDALLQKRIVDGVVRDVAGEKQQFQVQRQDESRFRLQNSRLADRTVTADDPLHRAETPRRQPLGAGMDQLRRKAILEQKYFGRTFDDNIHIQLIYNILDIHKMLAVPANHIVHTLNLLGGYGETDFVGMLPAGLPYDKLRVVKKKNGDTVDIKADIAAYAKRPQLAYLGAAFYDVTPGKSKRDAARGRVKREQDVYTILSLMSLLRQFCAHDSVRIWGQNTPAALYGLQALPQDMKDLLDDGWRRALGGVNDHFLDTNKVNLLTLFEYYGAETKQERVALTQDFYRFVVLKEQKNMGFSLRRLREELLKLPDAAYLTGQEYDSVRQKLYMLLDFLLCRLYAQERADRCEELVSALRCALSDEEKDAVYQAEAAALWQALGDTLRRELLPLLKGKKLQDKDKKKLDELGLSRDVLDGVLFRPAQQGSRANADYFCRLMHLSTWFMDGKEINTLLTTLISKLENIDSLRSVLESMGLAYSFVPAYAMFDHSRYIAGQLRVVNNIARMRKPAIGAKREMYRAAVVLLGVDSPEAAAAITDDLLQIDPETGKVRPRGDSARDTGLRNFVANNVVESRRFTYLLRYMTPEQARVLAQNEKLIAFVLSTVPSAQLERYCRTCGREDITGRPAQIRYLTAQIMGVRYESFTDVEQRGRGDNPKKERYKALIGLYLTVLYLAVKNMVNCNARYVIAFYCRDRDTALYQKEVCWYDLEEDKKSGKQRQVEDYTALTRYFVSQGYLNRHACGYLRSNMNGISNGLLAAYRNAVDHLNVIPPLGSLCRDIGRVDSYFALYHYAVQQYLNGRYYRKTPREQELFAAMAQHRTWCSDLVKALNTPFGYNLARYKNLSIDGLFDREGDHVVREDGEKPAE

SEQ ID NO: 83 - protein, 906 aa, Artificial Sequence
  gut metagenome P1E0k2120140920 c1000078
MEREVKKPPKKSLAKAAGLKSTFVISPQEKELAMTAFGRGNDALLQKRIVDGVVRDVAGEKQQFQVQRQDESRFRLQNSRLADRTVTADDPLHRAETPRRQPLGAGMDQLRRKAILEQKYFGRTFDDNIHIQLIYNILDIHKMLAVPANHIVHTLNLLGGYGETDFVGMLPAGLPYDKLRVVKKKNGDTVDIKADIAAYAKRPQLAYLGAAFYDVTPGKSKRDAARGRVKREQDVYAILSLMSLLRQFCAHDSVRIWGQNTTAALYHLQALPQDMKDLLDDGWRRALGGVNDHFLDTNKVNLLTLFEYYGAETKQARVALTQDFYRFVVLKEQKNMGFSLRRLREELLKLPDAAYLTGQEYDSVRQKLYMLLDFLLCRLYAQERADRCEELVSALRCALSDEEKDTVYQAEAAALWQALGDTLRRKLLPLLKGKKLQDKDKKKSDELGLSRDVLDGVLFRPAQQGSRANADYFCRLMHLSTWFMDGKEINTLLTTLISKLENIDSLRSVLESMGLAYSFVPAYAMFDHSRYIAGQLRVVNNIARMRKPAIGAKREMYRAAVVLLGVDSPEAAAAITDDLLQIDPETGKVRPRSDSARDTGLRNFIANNVVESRRFTYLLRYMTPEQARVLAQNEKLIAFVLSTVPDTQLERYCRTCGREDITGRPAQIRYLTAQIMGVRYESFTDVEQRGRGDNPKKERYKALIGLYLTVLYLAVKNMVNCNARYVIAFYCRDRDTALYQKEVCWYDLEEDKKSGKQRQVEDYTALTRYFVSQGYLNRHACGYLRSNMNGISNSLLTAYRNAVDHLNAIPPLGSLCRDIGRVDSYFALYHYAVQQYLNGRYYRKTPREQELFAAMAQHRTWCSDLVKALNTPFGYNLARYKNLSIDGLFDREGDHVVREDGEKPAE

SEQ ID NO: 84 - protein, 84 aa, Artificial Sequence
  Gut metagenome contig12990000099
INDLLTTLIHKFENIAAFLHVIQAEKLPVEFVPEFQVFSDSQKIAEELRIINSFARMNKPSANAREIMYIEAFKVLGMSGDEKQ

SEQ ID NO: 85 - protein, 345 aa, Artificial Sequence
  Gut metagenome contig525000349
MSKKENRKSYVKGLGLKSTLVSDSKVYLTTFADGSNAKLEKCVENNKIICISNDKEAFAASIANKNVGYKIKNDEKFRHPKGYDIISNNPLLHNNSVQQDMLGLKNVLEKRYFGKSSGGDNNLCIQIIHNIIDIEKILSEYIPNVVYAFNNIAGFKDEHNNIIDIIGTQTYNSSYTYADFSKDKSDKKYIEFQKLLKNKRLGYWGKAFFTGQGNNAKVRQENQCFHIIALLISLRNWATHSNELDKHTKRTWLYKLDDTNILNAEYVKTLNYLYDTIADELTKSFSKNGAVNVNYLAKKYNIKDDLPGFSEQYFRFSIMKEQKNLGFNISKLRENMLDFKDMSVI

SEQ ID NO: 86 - protein, 206 aa, Artificial Sequence
  Gut metagenome contig7229000302
KKISSLTKFCLGESDEKKLKALAKKSLEELKTTNSKLYENYIKYSDERKAEEAKRQINRERAKTAMNAHLRNTKWNDIMYGQLKDLADSKSRICSEFRNKAAHLEVARYAHMYINDISEVKSYFRLYHYIMQRRIIDVIENNPKAKYEGKVKVYFEDVKKNKKYNKNLLKLMCVPFGYCIPRFKNLSIEQMFDMNETDNSDKKKEK

SEQ ID NO: 87 - protein, 95 aa, Artificial Sequence
  Gut metagenome contig3227000343
IGDISEVNSYFQLYHYIMQRILIDKIGSKTTGKAKEYFDSVIVNKKYDDRLLKLLCSPLGYCLTRYKDLSIEALFDMNEAAKYDKLNKERKNKKK

SEQ ID NO: 88 - protein, 115 aa, Artificial Sequence
  Gut metagenome contig7030000469
SIRSKLYTMMDFVIYRYYIEESAKAAAENKPSESDSFVIRLRGSFNENQKEELYIEEAERLWKKFGEIMLKIKEFRGEKVKEYKKEVPRIERILPHGKDISAFSKLMYMLSMFLD

SEQ ID NO: 89 - protein, 110 aa, Artificial Sequence
  Gut metagenome contig5149000068
FRNKVAHLEAVRYAHLYINDIAEVNSYFQLYHYIIQRRIMAECYDKSSGKVREYFNAVNKEKKYNDRLLKLLCVPFGYCVTRFKDLSIEALFDKNEADRFDKEKKKAEKK

SEQ ID NO: 90 - protein, 84 aa, Artificial Sequence
  Gut metagenome contig400200045
MIEKKKSYAKGMGLKSTIVSGSKVYMTTFGDGSEARLEKVVENDSIKTLHEGEAFSAEMTDNNAGYKIGNVKFSHPNGYDVVAN

SEQ ID NO: 91 - protein, 94 aa, Artificial Sequence
  Gut metagenome contig10420000446
SSKSVAEKVNALTKIITGMNYDQFDSRRNVIENTGAGNAEREKYKKIISLYLTVIYHILKNIVNINSRYVIGFHCVERDAQLYKEKGYDINLKK

SEQ ID NO: 92 - protein, 967 aa, Artificial Sequence
  new flavefaciens, strain XPD3002
MIEKKKSFAKGMGVKSTLVSGSKVYMTTFAEGSDARLEKIVEGDSIRSVNEGEAFSAEMADKNAGYKIGNAKFSHPKGYAVVANNPLYTGPVQQDMLGLKETLEKRYFGESADGNDNICIQVIHNILDIEKILAEYITNAAYAVNNISGLDKDIIGFGKFSTVYTYDEFKDPEHHRAAFNNNDKLINAIKAQYDEFDNFLDNPRLGYFGQAFFSKEGRNYIINYGNECYDILALLSGLRHWVVHNNEEESRISRTWLYNLDKNLDNEYISTLNYLYDRITNELTNSFSKNSAANVNYIAETLGINPAEFAEQYFRFSIMKEQKNLGFNITKLREVMLDRKDMSEIRKNHKVFDSIRTKVYTMMDFVIYRYYIEEDAKVAAANKSLPDNEKSLSEKDIFVINLRGSFNDDQKDALYYDEANRIWRKLENIMHNIKEFRGNKTREYKKKDAPRLPRILPAGRDVSAFSKLMYALTMFLDGKEINDLLTTLINKFDNIQSFLKVMPLIGVNAKFVEEYAFFKDSAKIADELRLIKSFARMGEPIADARRAMYIDAIRILGTNLSYDELKALADTFSLDENGNKLKKGKHGMRNFIINNVISNKRFHYLIRYGDPAHLHEIAKNEAVVKFVLGRIADIQKKQGQNGKNQIDRYYETCIGKDKGKSVSEKVDALTKIITGMNYDQFDKKRSVIEDTGRENAEREKFKKIISLYLTVIYHILKNIVNINARYVIGFHCVERDAQLYKEKGYDINLKKLEEKGFSSVTKLCAGIDETAPDKRKDVEKEMAERAKESIDSLESANPKLYANYIKYSDEKKAEEFTRQINREKAKTALNAYLRNTKWNVIIREDLLRIDNKTCTLFRNKAVHLEVARYVHAYINDIAEVNSYFQLYHYIMQRIIMNERYEKSSGKVSEYFDAVNDEKKYNDRLLKLLCVPFGYCIPRFKNLSIEALFDRNEAAKFDKEKKKVSGNS

SEQ ID NO: 93 - protein, 146 aa, Artificial Sequence
  M26 Gut metagenome contig698000307
MIEKKKSFAKGMGVKSTLVSGSKVYMTTFAEGSDAKLEKIVEGDSIRSVNEGEAFSAEMADKNAGYKIGNAKFSHPKGYAVVANNPLYTGPVQQDMLGLKETLEKRYFGESADGNDNICIQVIHNILDIEKILAEYITNAAYSVTD

SEQ ID NO: 94 - protein, 724 aa, Artificial Sequence
  M36 Uncultured Eubacterium sp TS28 c40956
RIRFVLSGIFVNAFSSKHGFESGVEINTSNPTHRSGESSPVRGDMLGLKSELEKRFFGKTFDDNIHIQLIYNILDIEKILAVYVTNIVYALNNMLGVKGSESHDDFIGYLSTNNTYDVFIDPDNSSLSDDKKANVRKSLSKFNVLLKTKRLGYFGLEEPKTKDNRVSEAYKKRVYHMLAIVGQIRQCVFHDKSGAKRFDLYSFINNIDPEYRDTLDYLVEERLKSINKDFIQGNKVNISLLIDMMKGYEADDIIRLYYDFIVLKSQKNLGFSIKKLREKMLEEYGFRFKDKQYDSVRSKMYKLMDFLLFCNYYRNDIAAGEALVRKLRFSMTDDEKEGLYADEAAKLWGKFRNDFENIADHMNGDVIKELGKADMDFDEKILDSEKKNASDLLYFSKMIYMLTYFLDGKEINDLLTTLISKFDNIKEFLKIMKSSAVNVECELTAGYKLFNDSQRITNELFIVKNIASMRKPAASAKLTMFRDALTILGIDDKITDDRISEILKLKEKGKGIHGLRNFITNNVIESSRFVYLIKYANAQKIRKVAENEKVVMFVLGGIPDTQIERYYKSCVEFPDMNSSLEVKRSELARMIKNISFDDFKNVKQQAKGQRKRRLRRGQKAVIGLYLTVMYLLVKNLVNVNARYVIAIHCLERDFGLYKEIIPELASKNLKNDYRILSQTLCELCDKSPNLFLKKNERLRKCVEVDINNADSSMTRKYRNCIAHL

SEQ ID NO: 95 - protein, 219 aa, Artificial Sequence
  M12 gut metagenome P25C0k2120140920 c134000066
MAKKNKMKPRELREAQKKARQFKAAEINNNAAPAIAAMPAAEVIAPVAEKKKSSVKAAGMKSILVSENKMYITSFGKGNSAVLEYEVDNNDYNKTQLSSKDNSNIELCGVNEVNITFSSKHGFESGVEINTSNPTHRSGESSPVRWDMLGLKSELEKRFFGKTFDDNIHIQLIYNILDIEKILAVYVTNIVYALNNMLGVKGSESHDDFIGYLSTNNIY

SEQ ID NO: 96 - protein, 915 aa, Artificial Sequence
  Cas13d sequence from human gut metagenome
MAKKNKMKPRELREAQKKARQFKAAEINNNAAPAIAAMPAAEVIAPVAEKKKSSVKAAGMKSILVSENKMYITSFGKGNSAVLEYEVDNNDYNKTQLSSKDNSNIELCGVNEVNITFSSKHGFESGVEINTSNPTHRSGESSPVRWDMLGLKSELEKRFFGKTFDDNIHIQLIYNILDIEKILAVYVTNIVYALNNMLGVKGSESHDDFIGYLSTNNIYDVFIDPDNSSLSDDKKANVRKSLSKFNVLLKTKRLGYFGLEEPKTKDTRVSQAYKKRVYHMLAIVGQIRQCVFHDKSGAKRFDLYSFINNIDPEYRETLDYLVDERFDSINKGFIQGNKVNISLLIDMMKGYEADDIIRLYYDFIVLKSQKNLGFSIKKLREKMLEEYGYRFKDKQMYKLMDFLLFCNYYRNDVVAGEALVRKLRFSMTDDEKEGIYADEASKLWGKFRNDFENIADHMNGDVIKELGKADMDFDEKILDSEKKNASDLLYFSKMIYMLTYFLDGKEINDLLTTLISKFDNIKEFLKIMKSSAVDVECELTAGYKLFNDSQRITNELFIVKNIASMRKPASSAKLTMFRDALTILGIDDNITDDRISEILKLKEKGKGIHGLRNFITNNVIESSRFVYLIKYANAQKIREVAKNEKVVMFVLGGIPDTQIERYYKSCVEFPDMNSSLEVKRSELARMIKNISFDDFKNVKQQAKGRENVAKERAKAVIGLYLTVMYLLVKNLVNVNARYVIAIHCLERDFGLYKEIIPELASKNLKNDYRILSQTLCELCDNGDESPNLFLKKNKRLRKCVEVDINNADSNMTRKYRNCIAHLTVVRELKEYIGDIRTVDSYFSIYHYVMQRCITKREDDTKQEEKIKYEDDLLKNHGYTKDFVKALNSPFGYNIPRFKNLSIEQLFDRNEYLTEK

SEQ ID NO: 97 - protein, 922 aa, Artificial Sequence
  M10 gut metagenome P25C90k2120140920, c28000041
MAKKNKMKPRELREAQKKARQFKAAEINNNAAPAIAAMPAAEVIAPVAEKKKSSVKAAGMKSILVSENKMYITSFGKGNSAVLEYEVDNNDYNKTQLSSKDNSNIELCGVNEVNITFSSKHGFESGVEINTSNPTHRSGESSPVRWDMLGLKSELEKRFFGKTFDDNIHIQLIYNILDIEKILAVYVTNIVYALNNMLGVKGSESHDDFIGYLSTNNIYDVFIDPDNSSLSDDKKANVRKSLSKFNVLLKTKRLGYFGLEEPKTKDTRVSQAYKKRVYHMLAIVGQIRQCVFHDKSGAKRFDLYSFINNIDPEYRETLDYLVDERFDSINKGFIQGNKVNISLLIDMMKGYEADDIIRLYYDFIVLKSQKNLGFSIKKLREKMLEEYGYRFKDKQYDSVRSKMYKLMDFLLFCNYYRNDVVAGEALVRKLRFSMTDDEKEGIYADEASKLWGKFRNDFENIADHMNGDVIKELGKADMDFDEKILDSEKKNASDLLYFSKMIYMLTYFLDGKEINDLLTTLISKFDNIKEFLKIMKSSAVDVECELTAGYKLFNDSQRITNELFIVKNIASMRKPASSAKLTMFRDALTILGIDDNITDDRISEILKLKEKGKGIHGLRNFITNNVIESSRFVYLIKYANAQKIREVAKNEKVVMFVLGGIPDTQIERYYKSCVEFPDMNSSLEVKRSELARMIKNISFDDFKNVKQQAKGRENVAKERAKAVIGLYLTVMYLLVKNLVNVNARYVIAIHCLERDFGLYKEIIPELASKNLKNDYRILSQTLCELCDNGDESPNLFLKKNKRLRKCVEVDINNADSNMTRKYRNCIAHLTVVRELKEYIGDIRTVDSYFSIYHYVMQRCITKREDDTKQEEKIKYEDDLLKNHGYTKDFVKALNSPFGYNIPRFKNLSIEQLFDRNEYLTEK

SEQ ID NO: 98 - protein, 922 aa, Artificial Sequence; identical to SEQ ID NO: 97
  M11 gut metagenome P25C7k2120140920 c4078000105

SEQ ID NO: 99 - protein, 636 aa, Artificial Sequence
  gut metagenome P25C0k2120140920 c32000045
IRQCVFHDKSGAKRFDLYSFINNIDPEYRETLDYLVDERFDSINKGFIQGNKVNISLLIDMMKGYEADDIIRLYYDFIVLKSQKNLGFSIKKLREKMLEEYGYRFKDKQYDSVRSKMYKLMDFLLFCNYYRNDVVAGEALVRKLRFSMTDDEKEGIYADEASKLWGKFRNDFENIADHMNGDVIKELGKADMDFDEKILDSEKKNASDLLYFSKMIYMLTYFLDGKEINDLLTTLISKFDNIKEFLKIMKSSAVDVECELTAGYKLFNDSQRITNELFIVKNIASMRKPASSAKLTMFRDALTILGIDDNITDDRISEILKLKEKGKGIHGLRNFITNNVIESSRFVYLIKYANAQKIREVAKNEKVVMFVLGGIPDTQIERYYKSCVEFPDMNSSLEVKRSELARMIKNISFDDFKNVKQQAKGRENVAKERAKAVIGLYLTVMYLLVKNLVNVNARYVIAIHCLERDFGLYKEIIPELASKNLKNDYRILSQTLCELCDNGDESPNLFLKKNKRLRKCVEVDINNADSNMTRKYRNCIAHLTVVRELKEYIGDIRTVDSYFSIYHYVMQRCITKREDDTKQEEKIKYEDDLLKNHGYTKDFVKALNSPFGYNIPRFKNLSIEQLFDRNEYLTEK

SEQ ID NO: 100 - protein, 929 aa, Artificial Sequence
  M13 gut metagenome P23C7k2120140920 c3000067
MAKKNKMKPRELREAQKKARQLKAAEINNNAAPAIAAMPAAQVIAPAAEKKKSSVKAAGMKSILVSENKMYITSFGKGNSAVLEYEVDKVDNNNYNKTQLSSKDNSNIELGDVNEVNITFSSKHGFESGVEINTSNPTHRSGESSPVRWDMLGLKSELEKRFFGKTFDDNIHIQLIYNILDIEKILAVYVTNIVYALNNMLGIKGSESYDDFMGYLSARNTYEVFTHPDKSNLSDKVKGNIKKSFSTFNDLLKTKRLGYFGLEEPKTKDTRVSEAYKKRVYHMLAIVGQIRQCVFHDLSEHSEYDLYSFIDNSKKVYRECRETLNYLVDERFDSINKGFIQGNKVNISLLIDMMKDDYEADDIIHLYYDFIVLKSQKNLGFSIKKLREKMLDEYGFRFKDKQYDSVRSKMYKLMDFLLFCNYYRNDVVAGEALVRKLRFSMTDDEKEGIYADEAEKLWGKFRNDFENIADHMNGDVIKELGKADMDFDEKILDSEKKNASDLLYFSKMIYMLTYFLDGKEINDLLTTLISKFDNIKEFLKIMKSSAVDVECELTAGYKLFNDSQRITNELFIVKNIASMRKPAASAKLTMFRDALTILGIDDKITDDRISEILKLKEKGKGIHGLRNFITNNVIESSRFVYLIKYANAQKIREVAKNEKVVMFVLGGIPDTQIERYYKSCVEFPDMNSSLKVKRSELARMIKNIRFDDFKNVKQQAKGRENVAKERAKAVIGLYLTVMYLLVKNLVNVNARYVIAIHCLERDFGLYKEIIPELASKNLKNDYRILSQTLCELCDDRDESPNLFLKKNRRLRKCVEVDINNADSSMTRKYRNCIAHLTVVRELKEYIGDIRTVDSYFSIYHYVMQRCITKREDDTKQEEKIKYEDDLLKNHGYTKDFVKALNSPFGYNIPRFKNLSIEQLFDRNEYLTEK

SEQ ID NO: 101 - protein, 923 aa, Artificial Sequence
  M5 gut metagenome P18E90k2120140920
MAKKNKMKPRELREAQKKARQLKAAEINNNAVPAIAAMPAAEVIAPAAEKKKSSVKAAGMKSILVSENKMYITSFGKGNSAVLEYEVDKVDDNDYNKTQLSSKDNSNIELGNVNEVNITFSSRRGFESGVEINTSNPTHRSGESSSVRGDMLGLKSELEKRFFGKTFDDNIHIQLIYNILDIEKILAVYVTNIVYALNNMLGVKGSESYDDFMGYLSAQNTYYIFTHPDKSNLSDKVKGNIKKSLSKFNDLLKTKRLGYFGLEEPKTKDKRVSEAYKKRVYHMLAIVGQIRQSVFHDKSNELDEYLYSFIDIIDSEYRDTLDYLVDERFDSINKGFIQGNKVNISLLIDMMKDDYEADDIIRLYYDFIVLKSQKNLGFSIKKLREKMLEEYGFRFKDKQYDSVRSKMYKIMDFLLFCNYYRNDVVAGEALVRKLRFSMTDDEKEGIYADEAAKLWGKFRNDFENIADHMNGDVIKELGKADMDFDEKILDSEKKNASDLLYFSKMIYMLTYFLDGKEINDLLTTLISKFDNIKEFLKIMKSSAVDVECELTAGYKLFNDSQRITNELFIVKNIASMRKPAASAKLTMFRDALTILGIDDNITDDRISEILKLKEKGKGIHGLRNFITNNVIESSRFVYLIKYANAQKIREVAKNEKVVMFVLGGIPDTQIERYYKSCVEFPDMNSSLEVKRSELARMIKNICFDDFKNVKQQAKGRENVAKERAKAVIGLYLTVMYLLVKNLVNVNARYVIAIHCLERDFGLYKEIVSELASKNLKNDYRILSQTLCELCDKSPNLFLKKNERLRKCVEVDINNADSSMTRKYRNCIAHLTVVRELKEYIGDIRAVDSYFSIYHYVMQRCITKRGNDTKQEDKIKYEDDLLKNHGYTKDFVKALNSPFGYNIPRFKNLSIEQLFDRNEYLTEK

SEQ ID NO: 102 - protein, 923 aa, Artificial Sequence; identical to SEQ ID NO: 101
  M21 gut metagenome P18E0k2120140920

SEQ ID NO: 103 - protein, 926 aa, Artificial Sequence
  M7 gut metagenome P38C7k2120140920 c4841000003
  misc_feature (551)..(551): Xaa can be any naturally occurring amino acid
MAKKNKMKPRELREAQKKARQLKAAEINNNAAPAIAAMPAAEAIAPAAEKKKSSVKAAGMKSIFVSENKMYITSFGKGNSAVLEYEVDKVDNNVYNQTQLSSEDSSNIELCGVTKVNITFSSKHGLESGVEISTSNPTHRSGESSPVRWDMLGLKSELEKRFFGKTFDDNIHIQLIYNILDIEKILAVYVTNIVYALNNMLGIKDSESYDDFMGYLSARNTYKVFTHPDKSNLSDKVKGNIKKSFSTFNDLLKTKRLGYFGLEEPKTKDTRVSEAYKKRVYHMLAIVGQIRQCVFHDLSEHSEYDLYSFIDNSKKVYRECRETLNYLVDERFDSINKGFIQGNKVNISLLIDMMKDDYEADDIIHLYYDFIVLKSQKNLGFSIKKLREKMLDEYGFRFKDKQYDSVRSKMYKLMDFLLFCNYYRNDVVAGEALVRKLRFSMTDDEKEGIYADEAEKLWGKFRNDFENIADHMNGDVIKELGKADMDFDEKIIDSEKKNASDLLYFSKMIYMLTYFLDGKEINDLLTTLISKFDNIKEFLKIMKSSAVDVEXELTAGYKLFNDSQRITNELFIVKNIASMRKPAASAKLTMFRDALTILGIDDNITDDRISEILKLKEKGKGIHGLRNFITNNVIESSRFVYLIKYANAQKIREVAKNEKVVMFVLGGIPDTQIERYYKSCVEFPDMNSSLGVKRSELARMIKNISFDDFKNVKQQAKGRENVAKERAKAVIGLYLTVMYLLVKNLVNVNARYVIAIHCLERDFGLYKEIIPELASKNLKNDYRILSQTLCELCDKSPNLFLKKNERLRKCVEVDINNADSSMTRKYRNCIAHLTVVRELKEYIGDICTVDSYFSIYHYVMQRCITKRENDTKQEEKIKYEDDLLKNHGYTKDFVKALNSPFGYNIPRFKNLSIEQLFDRNEYLTEK

SEQ ID NO: 104 - protein, 918 aa, Ruminococcus bicirculans
MAKKNKMKPRELREAQKKARQLKAAEINNNAVPAIAAMPAAEAAAPAAEKKKSSVKAAGMKSILVSENKMYITSFGKGNSAVLEYEVDNNDYNKTQLSSKDNSNIELCDVGKVNITFSSRRGFESGVEINTSNPTHRSGESSSVRGDMLGLKSELEKRFFGKNFDDNIHIQLIYNILDIEKILAVYVTNIVYALNNMLGEGDESNYDFMGYLSTFNTYKVFTNPNGSTLSDDKKENIRKSLSKFNALLKTKRLGYFGLEEPKTKDTRASEAYKKRVYHMLAIVGQIRQCVFHDKSGAKRFDLYSFINNIDPEYRETLDYLVDERFDSINKGFIQGNKVNISLLIDMMKGYEADDIIRLYYDFIVLKSQKNLGFSIKKLREKMLDEYGFRFKDKQYDSVRSKMYKLMDFLLFCNYYRNDIAAGESLVRKLRFSMTDDEKEGIYADEAAKLWGKFRNDFENIADHMNGDVIKELGKADMDFDEKILDSEKKNASDLLYFSKMIYMLTYFLDGKEINDLLTTLISKFDNIKEFLKIMKSSAVDVECELTAGYKLFNDSQRITNELFIVKNIASMRKPAASAKLTMFRDALTILGIDDKITDDRISEILKLKEKGKGIHGLRNFITNNVIESSRFVYLIKYANAQKIREVAKNEKVVMFVLGGIPDTQIERYYKSCVEFPDMNSSLGVKRSELARMIKNISFDDFKNVKQQAKGRENVAKERAKAVIGLYLTVMYLLVKNLVNVNARYVIAIHCLERDFGLYKEIIPELASKNLKNDYRILSQTLCELCDKSPNLFLKKNERLRKCVEVDINNADSSMTRKYRNCIAHLTVVRELKEYIGDICTVDSYFSIYHYVMQRCITKRENDTKQEEKIKYEDDLLKNHGYTKDFVKALNSPFGYNIPRFKNLSIEQLFDRNEYLTEK

SEQ ID NO: 105 - protein, 920 aa, Artificial Sequence
  our cloned CAG Ncas1
MAKKNKMKPRELREAQKKARQLKAAEINNNAAPAIAAMPAAEAAAPAAEKKKSSVKAAGMKSILVSENKMYITSFGKGNSAVLEYEVDNNDYNQTQLSSKGSSNIELHGVNEVNITFSSKHGFESGVEINTSNPTHRSGESSPVRWDMLGLKSELEKRFFGKTFDDNIHIQLIYNILDIEKILAVYVTNIVYALNNMLGVKGSESHDDFIGYLSTNNTYDVFIDPDNSSLSDDKKANVRKSLSKFNVLLKTKRLGYFGLEEPKTKDTRVSQAYKKRVYLAIVGQIRQCVFHDKSGAKRFDLYSFINNIDPEYRETLDYLVDERFDSINKGFIEGNKINISLLIDMMKGYEADDIIRLYYDFIVLKSQKNLGFSIKKLREKMLDEYGFRFKDKQYDPVRSKMYKLMDFLLFCNHYRNDVAAGEALVRKLRFSMTDDEKEGIYADEAAKLWGKFRNDFENIADHMNGDVIKELGKADMDFDEKILDSEKKNASDLLYFSKMIYMLTYFLDGKEINDLLTTLISKFDNIKEFLKIMKSSAVDVECELTAGYKLFNDSQRITNELFIVKNIASMRKPAASAKLTMFRDALTILGIDDNITDDRISEILKLKEKGKGIHGLRNFITNNVIESSRFVYLIKYANAQKIREVAKNEKVVMFVLGGIPDTHIERYYKSCVEFPDMNSSLEAKRSELARMIKNISFDDFKNVKQQAKGRENVAKERAKAVIGLYLTVMYLLVKNLVNVNARYVIAIHCLERDFGLYKEIIPELASKNLKNDYRILSQTLCELCDDRDESPNLFLKKNKRLRKCVEVDINNADSSMTRKYRNCIAHLTVVRELKEYIGDIRTVDSYFSIYHYVMQRCITKRENDTKQEEKIKYEDDLLKNHGYTKDFVKALNSPFGYNIPRFKNLSIEQLFDRNEYLTEK

SEQ ID NO: 106 - protein, 922 aa, Artificial Sequence
  consensus 1
  misc_feature (89)..(89): Xaa can be any naturally occurring amino acid
  misc_feature (386)..(386): Xaa can be any naturally occurring amino acid
  misc_feature (789)..(790): Xaa can be any naturally occurring amino acid
MAKKNKMKPRELREAQKKARQLKAAEINNNAAPAIAAMPAAEVIAPAAEKKKSSVKAAGMKSILVSENKMYITSFGKGNSAVLEYEVDXNNDYNKTQLSSKDNSNIELGDVNEVNITFSSKHGFESGVEINTSNPTHRSGESSPVRWDMLGLKSELEKRFFGKTFDDNIHIQLIYNILDIEKILAVYVTNIVYALNNMLGIKGSESYDDFMGYLSARNTYDVFTHPDKSNLSDKVKGNIKKSLSKFNDLLKTKRLGYFGLEEPKTKDTRVSEAYKKRVYHMLAIVGQIRQCVFHDKSGAKRFDLYSFIDNIDPEYRDTLDYLVDERFDSINKGFIQGNKVNISLLIDMMKGYEADDIIRLYYDFIVLKSQKNLGFSIKKLREKMLXEYGFRFKDKQYDSVRSKMYKLMDFLLFCNYYRNDVVAGEALVRKLRFSMTDDEKEGIYADEAAKLWGKFRNDFENIADHMNGDVIKELGKADMDFDEKILDSEKKNASDLLYFSKMIYMLTYFLDGKEINDLLTTLISKFDNIKEFLKIMKSSAVDVECELTAGYKLFNDSQRITNELFIVKNIASMRKPAASAKLTMFRDALTILGIDDNITDDRISEILKLKEKGKGIHGLRNFITNNVIESSRFVYLIKYANAQKIREVAKNEKVVMFVLGGIPDTQIERYYKSCVEFPDMNSSLEVKRSELARMIKNISFDDFKNVKQQAKGRENVAKERAKAVIGLYLTVMYLLVKNLVNVNARYVIAIHCLERDFGLYKEIIPELASKNLKNDYRILSQTLCELCDXXESPNLFLKKNKRLRKCVEVDINNADSSMTRKYRNCIAHLTVVRELKEYIGDIRTVDSYFSIYHYVMQRCITKREDDTKQEEKIKYEDDLLKNHGYTKDFVKALNSPFGYNIPRFKNLSIEQLFDRNEYLTEK

SEQ ID NO: 107 - protein, 922 aa, Artificial Sequence
  M18 gut metagenome P22E0k2120140920 c3395000078
MAKKNKMKPRELREAQKKARQLKAAEINNNAAPAIAAMPAAEVIAPVAEKKKSSVKAAGMKSILVSENKMYITSFGKGNSAVLEYEVDNNDYNKTQLSSKDNSNIELGDVNEVNITFSSKHGFGSGVEINTSNPTHRSGESSPVRGDMLGLKSELEKRFFGKTFDDNIHIQLIYNILDIEKILAVYVTNIVYALNNMLGIKDSESYDDFMGYLSARNTYEVFTHPDKSNLSDKVKGNIKKSLSKFNDLLKTKRLGYFGLEEPKTKDTRASEAYKKRVYHMLAIVGQIRQCVFHDKSGAKRFDLYSFINNIDPEYRDTLDYLVEERLKSINKDFIEGNKVNISLLIDMMKGYEADDIIRLYYDFIVLKSQKNLGFSIKKLREKMLEEYGFRFKDKQYDSVRSKMYKLMDFLLFCNYYRNDVAAGEALVRKLRFSMTDDEKEGIYADEAAKLWGKFRNDFENIADHMNGDVIKELGKADMDFDEKILDSEKKNASDLLYFSKMIYMLTYFLDGKEINDLLTTLISKFDNIKEFLKIMKSSAVDVECELTAGYKLFNDSQRITNELFIVKNIASMRKPAASAKLTMFRDALTILGIDDNITDDRISEILKLKEKGKGIHGLRNFITNNVIESSRFVYLIKYANAQKIREVAKNEKVVMFVLGGIPDTQIERYYKSCVEFPDMNSSLEAKRSELARMIKNISFDDFKNVKQQAKGRENVAKERAKAVIGLYLTVMYLLVKNLVNVNARYVIAIHCLERDFGLYKEIIPELASKNLKNDYRILSQTLCELCDDRNESSNLFLKKNKRLRKCVEVDINNADSSMTRKYRNCIAHLTVVRELKEYIGDIRTVDSYFSIYHYVMQRCITKRGDDTKQEEKIKYEDDLLKNHGYTKDFVKALNSPFGYNIPRFKNLSIEQLFDRNEYLTEK

SEQ ID NO: 108 - protein, 922 aa, Artificial Sequence; identical to SEQ ID NO: 107
  M17 gut metagenome P22E90k2120140920 c114

SEQ ID NO: 109 - protein, 922 aa, Unknown
  Ruminococcus sp. CAG57
MAKKNKMKPRELREAQKKARQLKAAEINNNAAPAIAAMPAAEVIAPVAEKKKSSVKAAGMKSILVSENKMYITSFGKGNSAVLEYEVDNNDYNKTQLSSKDNSNIELGDVNEVNITFSSKHGFGSGVEINTSNPTHRSGESSPVRGDMLGLKSELEKRFFGKTFDDNIHIQLIYNILDIEKILAVYVTNIVYALNNMLGIKDSESYDDFMGYLSARNTYEVFTHPDKSNLSDKVKGNIKKSLSKFNDLLKTKRLGYFGLEEPKTKDTRASEAYKKRVYHMLAIVGQIRQCVFHDKSGAKRFDLYSFINNIDPEYRDTLDYLVEERLKSINKDFIEGNKVNISLLIDMMKGYEADDIIRLYYDFIVLKSQKNLGFSIKKLREKMLEEYGFRFKDKQYDSVRSKMYKLMDFLLFCNYYRNDVAAGEALVRKLRFSMTDDEKEGIYADEAAKLWGKFRNDFENIADHMNGDVIKELGKADMDFDEKILDSEKKNASDLLYFSKMIYMLTYFLDGKEINDLLTTLISKFDNIKEFLKIMKSSAVDVECELTAGYKLFNDSQRITNELFIVKNIASMRKPAASAKLTMFRDALTILGIDDNITDDRISEILKLKEKGKGIHGLRNFITNNVIESSRFVYLIKYANAQKIREVAKDEKVVMFVLGGIPDTQIERYYKSCVEFPDMNSSLEAKRSELARMIKNISFDDFKNVKQQAKGRENVAKERAKAVIGLYLTVMYLLVKNLVNVNARYVIAIHCLERDFGLYKEIIPELASKNLKNDYRILSQTLCELCDDRNESSNLFLKKNKRLRKCVEVDINNADSSMTRKYRNCIAHLTVVRELKEYIGDIRTVDSYFSIYHYVMQRCITKRGDDTKQEEKIKYEDDLLKNHGYTKDFVKALNSPFGYNIPRFKNLSIEQLFDRNEYLTEK

SEQ ID NO: 110 - protein, 531 aa, Artificial Sequence
  gut metagenome P11E90k2120140920 c43000123
FRFKDKQYDSVRSKMYKLMDFLLFCNYYRNDVVAGEALVRKLRFSMTDDEKEGIYADEAAKLWGKFRNDFENIADHMNGDVIKELGKADMDFDEKILDSEKKNASDLLYFSKMIYMLTYFLDGKEINDLLTTLISKFDNIKEFLKIMKSSAVDVECELTAGYKLFNDSQRITNELFIVKNIASMRKPAASARLTMFRDALTILGIDDKITDDRISEILKLKEKGKGIHGLRNFITNNVIESSRFVYLIKYANAQKIREVAKNEKVVMFVLGGIPDTQIERYYKSCVEFPDMNSSLEAKRSELARMIKNISFDDFKNVKQQAKGRENVAKERAKAVIGLYLTVMYLLVKNLVNVNARYVIAIHCLERDFGLYKEIIPELASKNLKNDYRILSQTLCELCDKSPNLFLKKNERLRKCVEVDINNADSSMTRKYRNCIAHLTVVRELKEYIGDIRTVDSYFSIYHYVMQRCITKRENDTKQEDKIKYEDDLLKNHGYTKDFVKALNSPFGYNIPRFKNLSIEQLFDRNEYLTEK

SEQ ID NO: 111 - protein, 925 aa, Artificial Sequence
  M6 gut metagenome P13E90k2120140920 c7000009
MAKKNKMKPRELREAQKKARQLKAAEIKNNAVPAIAAMPAAEAAAPAVEKKKSSVKAAGMKSILVSENKMYITSFGKGNSAVLEYEVDKVDNNNYNKTQLSSKDNSNIELGDVNEVNITFSSKRGNESGVEINTSNPTHRSGESSPVRWDMLGLKSELEKRFFGKTFDDNIHIQLIYNILDIEKILAVYVTNIVYALNNMLGIKGSESYDDFMGYLSARNTYEVFTHPDKSNLSDKVKGNIKKSLSKFNDLLKTKRLGYFGLEEPKTKDTRVSQAYKKRVYHMLAIVGQIRQCVFHDKSGAKRFDLYSFINNIDPEYRDTLDYLVEERLKSINKDFIEGNKVNISLLIDMMKGYEADDIIRLYYDFIVLKSQKNLGFSIKKLREKMLEEYGYRFKDKQYDSVRSKMYKLMDFLLFCNYYRNDVVAGEALVRKLRFSMTDDEKEGIYADEASKLWGKFRNDFENIADHMNGDVIKELGKADMDFDEKILDSEKKNASDLLYFSKMIYMLTYFLDGKEINDLLTTLISKFDNIKEFLKIMKSSAVDVECELTAGYKLFNDSQRITNELFIVKNIASMRKPAASAKLTMFRDALTILGIDDKITDDRISEILKLKEKGKGIHGLRNFITNNVIESSRFVYLIKYANAQKIREVAKNEKVVMFVLGGIPDTQIERYYKSCVEFPDMNSSLEAKRSELARMIKNIRFDDFKNVKQQAKGRENVAKERAKAVIGLYLTVMYLLVKNLVNVNARYVIAIHCLERDFGLYKEIIPELASKNLKNDYRILSQTLCELCDDRDESPNLFLKKNKRLRKCVEVDINNADSSMTRKYRNCIAHLTVVRELKEYIGDIRTVDSYFSIYHYVMQRCITKREDDTKQEEKIKYEDDLLKNHGYTKDFVKALNSPFGYNIPRFKNLSIEQLFDRNEYLTEK

SEQ ID NO: 112 - protein, 921 aa, Artificial Sequence
  M19 gut metagenome P17E90k2120140920
MAKKNKMKPRERREAQKKARQLKAAEINNNAVPAIAAMHAAEVIAPAAEKKKSSVKAAGMKSILVSENKMYITSFGKGNSAVLEYEVDNNDYNQTQLSSKDNSNIELCGVTKVNITFSSKHGFESGVEINTSNPTHRSGESSPVRGDMLGLKSELEKRFFGKTFDDNIHIQLIYNILDIEKILAVYVTNIVYALNNMLGEGDESNYDFMGYLSTFNTYKVFTNPNGSTLSDDKKENIRKSLSKFNALLKTKRLGYFGLEEPKTKDTRASEAYKKRVYHMLAIVGQIRQCVFHDKSGAKRFDLYSFINNIYPEYRDTLDYLVEERLKSINKDFIQGNKVNISLLIDMMKGYEADDIIRLYYDFIVLKSQKNLGFSIKKLREKMLDEYGFRFKDKQYDSVRSKMYKLMDFLLFCNYYRNDVVAGEALVRKLRFSMTDDEKEGIYADEAAKLWGKFRNDFENIADHMNGDVIKELGKADMDFDEKILDSEKKNASDLLYFSKMIYMLTYFLDGKEINDLLTTLISKFDNIKEFLKIMKSSAVDVECELTAGYKLFNDSQRITNELFIVKNIASMRKPAASAKLTMFRDALTILGIDDKITDDRISEILKLKEKGKGIHGLRNFITNNVIESSRFVYLIKYANAQKIREVAKNEKVVMFVLGGIPDTQIERYYKSCVEFPDMNSSLEAKRSELARMIKNISFDDFKNVKQQAKGRENVAKERAKAVIGLYLTVMYLLVKNLVNVNARYVIAIHCLERDFGLYKEIIPELASKNLKNDYRILSQTLCELCDDRDESPNLFLKKNKRLRKCVEVDINNADSSMTRKYRNCIAHLTVVRELKKYIGDIRTVDSYFSIYHYVMQRCITKREDDTKQEEKIKYEDDLLKNHGYTKDFVKALNSPFGYNIPRFKNLSIEQLFDRNEYLTEK

SEQ ID NO: 113 - protein, 234 aa, Artificial Sequence
  gut metagenome P17E0k2120140920, c87000043
MYFSKMIYMLTYFLDGKEINDLLTTLISKFDNIKEFLKIMKSSAVDVECELTAGYKLFNDSQRITNELFIVKNIASMRKPAASAKLTMFRDALTILGIDDKITDDRISEILKLKEKGKGIHGLRNFITNNVIESSRFVYLIKYANAQKIREVAKNEKVVMFVLGGIPDTQIERYYKSCVEFPDMNSSLEAKRSELARMIKNISFDDFKNVKQQAKGRENVAKERAKAVIGLYLT

SEQ ID NO: 114 - DNA, 2859 bp, Artificial Sequence
  Human codon-optimized Eubacterium siraeum nCas1
ggcaagaagatccatgccagggacctcagggagcaaagaaagaccgataggacagaaaagttcgccgatcagaacaagaagagggaggctgagagagctgtgcccaaaaaagacgccgccgtctccgtgaagagcgtgtccagcgtcagcagcaagaaggacaacgtcaccaagagcatggccaaggccgccggagtgaagtccgtctttgctgtgggaaacaccgtgtacatgacctccttcggcaggggcaacgatgccgtgctggagcagaaaatcgtggacacctcccatgagcccctgaatatcgacgatcccgcctatcaactcaacgtggtgaccatgaatggatacagcgtcacaggccatagaggagagacagtgtccgccgtgacagataatcccctgaggagattcaacggcaggaagaaggacgaacccgagcagagcgtccctacagacatgctctgcctgaagcccaccctcgagaaaaaattttttggaaaggagtttgatgacaacattcatattcagctgatctataatatcctggatatcgagaaaatcctggccgtgtactccaccaacgccatctacgctctcaacaacatgtccgccgacgaaaacatcgagaactccgacttcttcatgaaaagaacaacagacgagacctttgacgacttcgagaagaagaaggagagcaccaacagcagagagaaagctgactttgacgcctttgaaaagttcatcggaaactataggctggcctatttcgctgacgctttctacgtgaataaaaagaaccccaagggaaaggccaagaatgtcctgagggaggacaaggagctctacagcgtgctgacactgatcggaaagctgagacactggtgtgtccacagcgaggaaggaagggctgaattctggctgtacaagctggacgagctcaaagacgatttcaagaacgtcctggatgtggtgtataacagacccgtggaggagatcaacaacaggttcatcgaaaataacaaagtcaacatccagatcctgggctccgtgtataagaacaccgacatcgccgagctggtgaggtcctactatgagttcctgatcaccaaaaaatacaagaatatgggcttttccatcaagaagctcagggagagcatgctggagggcaagggctacgctgataaggagtacgatagcgtgagaaataagctgtaccagatgaccgatttcatcctctacaccggctacatcaacgaagatagcgatagggctgacgacctggtgaacacactgaggagctccctcaaggaggacgacaaaacaaccgtctactgcaaggaggccgattacctgtggaaaaagtacagggaaagcattagagaagtcgccgatgccctggatggcgacaacattaagaagctgtccaagagcaatattgagattcaggaggataagctgagaaaatgtttcattagctatgctgatagcgtgagcgagtttaccaagctgatctacctcctcacaagattcctgagcggcaaggagatcaatgacctggtgaccaccctgatcaacaagttcgataatattagatcctttctggagattatggatgaactgggcctggacaggacatttaccgccgagtacagcttcttcgaaggctccacaaagtacctggccgagctcgtggagctgaatagctttgtgaagtcctgctccttcgacatcaatgccaagaggaccatgtacagggacgccctggatatcctgggcatcgagtccgacaagaccgaggaggatattgagaagatgattgataatatcctgcagatcgacgccaacggagataaaaagctgaagaaaaacaacggactgagaaacttcatcgcttccaacgtcatcgacagcaatagattcaaatacctggtcaggtacggcaaccccaagaagattagagagacagccaagtgcaagcccgctgtgaggttcgtgctgaacgaaattcccgacgcccagatcgaaaggtactatgaggcttgctgccccaagaacaccgccctctgcagcgccaataagagaagggagaagctggccgacatgatcgctgagatcaaattcgagaattttagcgatgccggcaattaccagaaggctaacgtcacatccaggaccagcgaggccgagatcaagagaaaaaaccaggccattattaggctctatctgacagtgatgtatattatgctgaaaaacctggtgaacgtgaatgccaggtacgtcattgccttccactgcgtggaaagggacaccaagctgtacgccgaaagcggcctggaagtgggcaacatcgaaaagaacaaaacaaacctcaccatggccgtgatgggagtgaaactcgaaaacggaattatcaagacagagttcgataagagcttcgccgagaacgccgctaacagatacctgaggaacgccaggtggtataaactgatcctggacaacctgaaaaaatccgagagagccgtggtgaatgagttcagaaataccgtgtgccacctgaatgccatcaggaacatcaatatcaacatcaaggaaattaaggaggtggagaattatttcgctctgtaccactacctgatccagaagcacctggagaacaggttcgccgataagaaggtggaaagggatacaggcgatttcatcagcaaactggaggagcacaagacctattgcaaagactttgtgaaggcttactgcaccccctttggctacaacctggtgagatataagaatctcaccattgacggcctcttcgacaagaactaccctggcaaggatgactccgatgagcagaag

SEQ ID NO: 115 - DNA, 2862 bp, Artificial Sequence
  Human codon-optimized Eubacterium siraeum nCas1 HEPN-/-
ggcaagaagatccatgccagggacctcagggagcaaagaaagaccgataggacagaaaagttcgccgatcagaacaagaagagggaggctgagagagctgtgcccaaaaaagacgccgccgtctccgtgaagagcgtgtccagcgtcagcagcaagaaggacaacgtcaccaagagcatggccaaggccgccggagtgaagtccgtctttgctgtgggaaacaccgtgtacatgacctccttcggcaggggcaacgatgccgtgctggagcagaaaatcgtggacacctcccatgagcccctgaatatcgacgatcccgcctatcaactcaacgtggtgaccatgaatggatacagcgtcacaggccatagaggagagacagtgtccgccgtgacagataatcccctgaggagattcaacggcaggaagaaggacgaacccgagcagagcgtccctacagacatgctctgcctgaagcccaccctcgagaaaaaattttttggaaaggagtttgatgacaacattcatattcagctgatctataatatcctggatatcgagaaaatcctggccgtgtactccaccaacgccatctacgctctcaacaacatgtccgccgacgaaaacatcgagaactccgacttcttcatgaaaagaacaacagacgagacctttgacgacttcgagaagaagaaggagagcaccaacagcagagagaaagctgactttgacgcctttgaaaagttcatcggaaactataggctggcctatttcgctgacgctttctacgtgaataaaaagaaccccaagggaaaggccaagaatgtcctgagggaggacaaggagctctacagcgtgctgacactgatcggaaagctggcacactggtgtgtcgccagcgaggaaggaagggctgaattctggctgtacaagctggacgagctcaaagacgatttcaagaacgtcctggatgtggtgtataacagacccgtggaggagatcaacaacaggttcatcgaaaataacaaagtcaacatccagatcctgggctccgtgtataagaacaccgacatcgccgagctggtgaggtcctactatgagttcctgatcaccaaaaaatacaagaatatgggcttttccatcaagaagctcagggagagcatgctggagggcaagggctacgctgataaggagtacgatagcgtgagaaataagctgtaccagatgaccgatttcatcctctacaccggctacatcaacgaagatagcgatagggctgacgacctggtgaacacactgaggagctccctcaaggaggacgacaaaacaaccgtctactgcaaggaggccgattacctgtggaaaaagtacagggaaagcattagagaagtcgccgatgccctggatggcgacaacattaagaagctgtccaagagcaatattgagattcaggaggataagctgagaaaatgtttcattagctatgctgatagcgtgagcgagtttaccaagctgatctacctcctcacaagattcctgagcggcaaggagatcaatgacctggtgaccaccctgatcaacaagttcgataatattagatcctttctggagattatggatgaactgggcctggacaggacatttaccgccgagtacagcttcttcgaaggctccacaaagtacctggccgagctcgtggagctgaatagctttgtgaagtcctgctccttcgacatcaatgccaagaggaccatgtacagggacgccctggatatcctgggcatcgagtccgacaagaccgaggaggatattgagaagatgattgataatatcctgcagatcgacgccaacggagataaaaagctgaagaaaaacaacggactgagaaacttcatcgcttccaacgtcatcgacagcaatagattcaaatacctggtcaggtacggcaaccccaagaagattagagagacagccaagtgcaagcccgctgtgaggttcgtgctgaacgaaattcccgacgcccagatcgaaaggtactatgaggcttgctgccccaagaacaccgccctctgcagcgccaataagagaagggagaagctggccgacatgatcgctgagatcaaattcgagaattttagcgatgccggcaattaccagaaggctaacgtcacatccaggaccagcgaggccgagatcaagagaaaaaaccaggccattattaggctctatctgacagtgatgtatattatgctgaaaaacctggtgaacgtgaatgccaggtacgtcattgccttccactgcgtggaaagggacaccaagctgtacgccgaaagcggcctggaagtgggcaacatcgaaaagaacaaaacaaacctcaccatggccgtgatgggagtgaaactcgaaaacggaattatcaagacagagttcgataagagcttcgccgagaacgccgctaacagatacctgaggaacgccaggtggtataaactgatcctggacaacctgaaaaaatccgagagagccgtggtgaatgagttcgcaaataccgtgtgcgccctgaatgccatcaggaacatcaatatcaacatcaaggaaattaaggaggtggagaattatttcgctctgtaccactacctgatccagaagcacctggagaacaggttcgccgataagaaggtggaaagggatacaggcgatttcatcagcaaactggaggagcacaagacctattgcaaagactttgtgaaggcttactgcaccccctttggctacaacctggtgagatataagaatctcaccattgacggcctcttcgacaagaactaccctggcaaggatgactccgatgagcagaagtga

SEQ ID NO: 116 - DNA, 2892 bp, Artificial Sequence
  Human codon-optimized Eubacterium siraeum nCas1 with N-terminal NLS
agccccaagaagaagagaaaggtggaggccagcggcaagaagatccatgccagggacctcagggagcaaagaaagaccgataggacagaaaagttcgccgatcagaacaagaagagggaggctgagagagctgtgcccaaaaaagacgccgccgtctccgtgaagagcgtgtccagcgtcagcagcaagaaggacaacgtcaccaagagcatggccaaggccgccggagtgaagtccgtctttgctgtgggaaacaccgtgtacatgacctccttcggcaggggcaacgatgccgtgctggagcagaaaatcgtggacacctcccatgagcccctgaatatcgacgatcccgcctatcaactcaacgtggtgaccatgaatggatacagcgtcacaggccatagaggagagacagtgtccgccgtgacagataatcccctgaggagattcaacggcaggaagaaggacgaacccgagcagagcgtccctacagacatgctctgcctgaagcccaccctcgagaaaaaattttttggaaaggagtttgatgacaacattcatattcagctgatctataatatcctggatatcgagaaaatcctggccgtgtactccaccaacgccatctacgctctcaacaacatgtccgccgacgaaaacatcgagaactccgacttcttcatgaaaagaacaacagacgagacctttgacgacttcgagaagaagaaggagagcaccaacagcagagagaaagctgactttgacgcctttgaaaagttcatcggaaactataggctggcctatttcgctgacgctttctacgtgaataaaaagaaccccaagggaaaggccaagaatgtcctgagggaggacaaggagctctacagcgtgctgacactgatcggaaagctgagacactggtgtgtccacagcgaggaaggaagggctgaattctggctgtacaagctggacgagctcaaagacgatttcaagaacgtcctggatgtggtgtataacagacccgtggaggagatcaacaacaggttcatcgaaaataacaaagtcaacatccagatcctgggctccgtgtataagaacaccgacatcgccgagctggtgaggtcctactatgagttcctgatcaccaaaaaatacaagaatatgggcttttccatcaagaagctcagggagagcatgctggagggcaagggctacgctgataaggagtacgatagcgtgagaaataagctgtaccagatgaccgatttcatcctctacaccggctacatcaacgaagatagcgatagggctgacgacctggtgaacacactgaggagctccctcaaggaggacgacaaaacaaccgtctactgcaaggaggccgattacctgtggaaaaagtacagggaaagcattagagaagtcgccgatgccctggatggcgacaacattaagaagctgtccaagagcaatattgagattcaggaggataagctgagaaaatgtttcattagctatgctgatagcgtgagcgagtttaccaagctgatctacctcctcacaagattcctgagcggcaaggagatcaatgacctggtgaccaccctgatcaacaagttcgataatattagatcctttctggagattatggatgaactgggcctggacaggacatttaccgccgagtacagcttcttcgaaggctccacaaagtacctggccgagctcgtggagctgaatagctttgtgaagtcctgctccttcgacatcaatgccaagaggaccatgtacagggacgccctggatatcctgggcatcgagtccgacaagaccgaggaggatattgagaagatgattgataatatcctgcagatcgacgccaacggagataaaaagctgaagaaaaacaacggactgagaaacttcatcgcttccaacgtcatcgacagcaatagattcaaatacctggtcaggtacggcaaccccaagaagattagagagacagccaagtgcaagcccgctgtgaggttcgtgctgaacgaaattcccgacgcccagatcgaaaggtactatgaggcttgctgccccaagaacaccgccctctgcagcgccaataagagaagggagaagctggccgacatgatcgctgagatcaaattcgagaattttagcgatgccggcaattaccagaaggctaacgtcacatccaggaccagcgaggccgagatcaagagaaaaaaccaggccattattaggctctatctgacagtgatgtatattatgctgaaaaacctggtgaacgtgaatgccaggtacgtcattgccttccactgcgtggaaagggacaccaagctgtacgccgaaagcggcctggaagtgggcaacatcgaaaagaacaaaacaaacctcaccatggccgtgatgggagtgaaactcgaaaacggaattatcaagacagagttcgataagagcttcgccgagaacgccgctaacagatacctgaggaacgccaggtggtataaactgatcctggacaacctgaaaaaatccgagagagccgtggtgaatgagttcagaaataccgtgtgccacctgaatgccatcaggaacatcaatatcaacatcaaggaaattaaggaggtggagaattatttcgctctgtaccactacctgatccagaagcacctggagaacaggttcgccgataagaaggtggaaagggatacaggcgatttcatcagcaaactggaggagcacaagacctattgcaaagactttgtgaaggcttactgcaccccctttggctacaacctggtgagatataagaatctcaccattgacggcctcttcgacaagaactaccctggcaaggatgactccgatgagcagaag

SEQ ID NO: 117 - DNA, 2931 bp, Artificial Sequence
  Human codon-optimized Eubacterium siraeum nCas1 with N- and C-terminal NLS tags
agccccaagaagaagagaaaggtggaggccagcggcaagaagatccatgccagggacctcagggagcaaagaaagaccgataggacagaaaagttcgccgatcagaacaagaagagggaggctgagagagctgtgcccaaaaaagacgccgccgtctccgtgaagagcgtgtccagcgtcagcagcaagaaggacaacgtcaccaagagcatggccaaggccgccggagtgaagtccgtctttgctgtgggaaacaccgtgtacatgacctccttcggcaggggcaacgatgccgtgctggagcagaaaatcgtggacacctcccatgagcccctgaatatcgacgatcccgcctatcaactcaacgtggtgaccatgaatggatacagcgtcacaggccatagaggagagacagtgtccgccgtgacagataatcccctgaggagattcaacggcaggaagaaggacgaacccgagcagagcgtccctacagacatgctctgcctgaagcccaccctcgagaaaaaattttttggaaaggagtttgatgacaacattcatattcagctgatctataatatcctggatatcgagaaaatcctggccgtgtactccaccaacgccatctacgctctcaacaacatgtccgccgacgaaaacatcgagaactccgacttcttcatgaaaagaacaacagacgagacctttgacgacttcgagaagaagaaggagagcaccaacagcagagagaaagctgactttgacgcctttgaaaagttcatcggaaactataggctggcctatttcgctgacgctttctacgtgaataaaaagaaccccaagggaaaggccaagaatgtcctgagggaggacaaggagctctacagcgtgctgacactgatcggaaagctgagacactggtgtgtccacagcgaggaaggaagggctgaattctggctgtacaagctggacgagctcaaagacgatttcaagaacgtcctggatgtggtgtataacagacccgtggaggagatcaacaacaggttcatcgaaaataacaaagtcaacatccagatcctgggctccgtgtataagaacaccgacatcgccgagctggtgaggtcctactatgagttcctgatcaccaaaaaatacaagaatatgggcttttccatcaagaagctcagggagagcatgctggagggcaagggctacgctgataaggagtacgatagcgtgagaaataagctgtaccagatgaccgatttcatcctctacaccggctacatcaacgaagatagcgatagggctgacgacctggtgaacacactgaggagctccctcaaggaggacgacaaaacaaccgtctactgcaaggaggccgattacctgtggaaaaagtacagggaaagcattagagaagtcgccgatgccctggatggcgacaacattaagaagctgtccaagagcaatattgagattcaggaggataagctgagaaaatgtttcattagctatgctgatagcgtgagcgagtttaccaagctgatctacctcctcacaagattcctgagcggcaaggagatcaatgacctggtgaccaccctgatcaacaagttcgataatattagatcctttctggagattatggatgaactgggcctggacaggacatttaccgccgagtacagcttcttcgaaggctccacaaagtacctggccgagctcgtggagctgaatagctttgtgaagtcctgctccttcgacatcaatgccaagaggaccatgtacagggacgccctggatatcctgggcatcgagtccgacaagaccgaggaggatattgagaagatgattgataatatcctgcagatcgacgccaacggagataaaaagctgaagaaaaacaacggactgagaaacttcatcgcttccaacgtcatcgacagcaatagattcaaatacctggtcaggtacggcaaccccaagaagattagagagacagccaagtgcaagcccgctgtgaggttcgtgctgaacgaaattcccgacgcccagatcgaaaggtactatgaggcttgctgccccaagaacaccgccctctgcagcgccaataagagaagggagaagctggccgacatgatcgctgagatcaaattcgagaattttagcgatgccggcaattaccagaaggctaacgtcacatccaggaccagcgaggccgagatcaagagaaaaaaccaggccattattaggctctatctgacagtgatgtatattatgctgaaaaacctggtgaacgtgaatgccaggtacgtcattgccttccactgcgtggaaagggacaccaagctgtacgccgaaagcggcctggaagtgggcaacatcgaaaagaacaaaacaaacctcaccatggccgtgatgggagtgaaactcgaaaacggaattatcaagacagagttcgataagagcttcgccgagaacgccgctaacagatacctgaggaacgccaggtggtataaactgatcctggacaacctgaaaaaatccgagagagccgtggtgaatgagttcagaaataccgtgtgccacctgaatgccatcaggaacatcaatatcaacatcaaggaaattaaggaggtggagaattatttcgctctgtaccactacctgatccagaagcacctggagaacaggttcgccgataagaaggtggaaagggatacaggcgatttcatcagcaaactggaggagcacaagacctattgcaaagactttgtgaaggcttactgcaccccctttggctacaacctggtgagatataagaatctcaccattgacggcctcttcgacaagaactaccctggcaaggatgactccgatgagcagaagggatccggacctaagaaaaagaggaaggtggcggccgct

SEQ ID NO: 118 - DNA, 2754 bp, Artificial Sequence
  Human codon-optimized uncultured Ruminococcus sp. nCas1
gccaagaagaacaagatgaaacccagggagctgagagaggctcagaagaaggctaggcaactgaaagccgccgagatcaataacaatgccgcccctgccatcgccgctatgcccgctgccgaagtcatcgctcccgccgccgaaaagaagaagagctccgtgaaagccgctggaatgaagtccattctggtgtccgagaacaaaatgtatatcacctccttcggcaaaggcaattccgctgtgctggagtatgaggtggacaacaacgactacaatcagacccagctcagcagcaaggataactccaacatccagctgggcggcgtgaatgaagtgaatatcaccttcagcagcaagcacggatttgagtccggagtcgagattaacacaagcaaccctacccacaggtccggagaaagcagccctgtcagaggagacatgctgggactgaaaagcgagctggagaagagattctttggaaagacctttgatgacaatatccacatccagctcatttacaacatcctggatatcgagaaaatcctggccgtgtatgtgaccaacatcgtgtacgctctgaacaacatgctcggcgtcaagggcagcgagtcccacgacgactttattggctatctgtccaccaacaatatttacgatgtcttcattgaccccgacaacagcagcctctccgacgacaaaaaagccaacgtcaggaagagcctcagcaaattcaacgccctgctgaagaccaagaggctcggatactttggcctggaggaacccaagaccaaggacaacagagtgagccaggcctataagaaaagggtgtaccacatgctggccatcgtgggccagatcagacagtgcgtgttccatgacaagtccggcgccaagagattcgacctgtactccttcattaacaacatcgaccctgagtacagggatacactggattacctcgtggaggagaggctgaagagcatcaacaaagactttattgaggacaacaaagtcaacatcagcctgctgatcgatatgatgaagggctacgaagctgacgacatcatcaggctgtactatgatttcattgtcctgaagagccagaagaacctgggattctccattaagaaactgagagaaaagatgctcgacgagtacggcttcaggttcaaggacaagcagtatgacagcgtgagatccaagatgtacaagctgatggattttctcctgttttgcaactattacaggaacgacatcgccgccggcgaatccctggtcaggaaactgagattcagcatgaccgacgacgagaaggaaggcatctacgccgacgaagccgctaagctgtggggaaaatttagaaatgacttcgagaacatcgctgaccacatgaacggcgatgtgatcaaggagctcggcaaggctgacatggatttcgacgagaagatcctggattccgagaagaagaatgccagcgatctgctgtacttcagcaagatgatttacatgctcacatattttctcgatggcaaggagatcaacgatctcctgaccacactgatcagcaagttcgacaacattaaagagttcctcaaaattatgaaatccagcgccgtggatgtcgagtgcgaactcaccgccggctacaagctcttcaacgacagccagaggatcaccaatgagctgttcattgtgaaaaatatcgctagcatgaggaaacccgccgcctccgctaaactgacaatgtttagagatgccctcaccatcctgggcatcgacgataagatcacagacgacagaattagcggaatcctgaagctcaaggaaaagggcaagggaatccatggcctcagaaatttcattaccaataacgtgatcgaaagcagcaggttcgtgtatctgatcaagtacgccaatgcccaaaagatcagggaggtggccaagaacgaaaaggtggtgatgttcgtgctgggcggcattcctgacacacagatcgaaaggtactacaagagctgtgtggagttccccgatatgaactccagcctgggcgtgaagagatccgaactggctaggatgatcaagaatattagcttcgacgacttcaagaacgtgaagcaacaggccaaaggaagggagaacgtcgccaaagagagagccaaggccgtgatcggactctacctgaccgtcatgtacctcctcgtgaagaacctggtgaacgtgaacgctagatacgtcatcgccatccattgcctcgagagggacttcggactgtacaaggagatcattcccgagctggccagcaaaaatctcaagaacgattacagaatcctgagccaaaccctgtgcgagctgtgtgacaagtcccccaacctgtttctgaagaagaatgaaaggctgagaaagtgcgtcgaagtcgacatcaacaacgctgacagctccatgaccaggaaatacaggaactgtatcgcccatctgaccgtggtgagggaactcaaggagtacatcggagatatctgcaccgtggactcctacttcagcatttatcactacgtgatgcagaggtgcattaccaagagagaaaatgacacaaagcaggaggagaagattaagtacgaggacgatctgctgaaaaaccacggatacaccaaggatttcgtcaaggccctcaatagccccttcggctacaatatccctaggtttaaaaacctgagcatcgagcagctgtttgacagaaatgaatacctgacagagaag

SEQ ID NO: 119 - DNA, 2757 bp, Artificial Sequence
  Human codon-optimized uncultured Ruminococcus sp. nCas1 HEPN-/-
atggccaagaagaacaagatgaaacccagggagctgagagaggctcagaagaaggctaggcaactgaaagccgccgagatcaataacaatgccgcccctgccatcgccgctatgcccgctgccgaagtcatcgctcccgccgccgaaaagaagaagagctccgtgaaagccgctggaatgaagtccattctggtgtccgagaacaaaatgtatatcacctccttcggcaaaggcaattccgctgtgctggagtatgaggtggacaacaacgactacaatcagacccagctcagcagcaaggataactccaacatccagctgggcggcgtgaatgaagtgaatatcaccttcagcagcaagcacggatttgagtccggagtcgagattaacacaagcaaccctacccacaggtccggagaaagcagccctgtcagaggagacatgctgggactgaaaagcgagctggagaagagattctttggaaagacctttgatgacaatatccacatccagctcatttacaacatcctggatatcgagaaaatcctggccgtgtatgtgaccaacatcgtgtacgctctgaacaacatgctcggcgtcaagggcagcgagtcccacgacgactttattggctatctgtccaccaacaatatttacgatgtcttcattgaccccgacaacagcagcctctccgacgacaaaaaagccaacgtcaggaagagcctcagcaaattcaacgccctgctgaagaccaagaggctcggatactttggcctggaggaacccaagaccaaggacaacagagtgagccaggcctataagaaaagggtgtaccacatgctggccatcgtgggccagatcgcacagtgcgtgttcgctgacaagtccggcgccaagagattcgacctgtactccttcattaacaacatcgaccctgagtacagggatacactggattacctcgtggaggagaggctgaagagcatcaacaaagactttattgaggacaacaaagtcaacatcagcctgctgatcgatatgatgaagggctacgaagctgacgacatcatcaggctgtactatgatttcattgtcctgaagagccagaagaacctgggattctccattaagaaactgagagaaaagatgctcgacgagtacggcttcaggttcaaggacaagcagtatgacagcgtgagatccaagatgtacaagctgatggattttctcctgttttgcaactattacaggaacgacatcgccgccggcgaatccctggtcaggaaactgagattcagcatgaccgacgacgagaaggaaggcatctacgccgacgaagccgctaagctgtggggaaaatttagaaatgacttcgagaacatcgctgaccacatgaacggcgatgtgatcaaggagctcggcaaggctgacatggatttcgacgagaagatcctggattccgagaagaagaatgccagcgatctgctgtacttcagcaagatgatttacatgctcacatattttctcgatggcaaggagatcaacgatctcctgaccacactgatcagcaagttcgacaacattaaagagttcctcaaaattatgaaatccagcgccgtggatgtcgagtgcgaactcaccgccggctacaagctcttcaacgacagccagaggatcaccaatgagctgttcattgtgaaaaatatcgctagcatgaggaaacccgccgcctccgctaaactgacaatgtttagagatgccctcaccatcctgggcatcgacgataagatcacagacgacagaattagcggaatcctgaagctcaaggaaaagggcaagggaatccatggcctcagaaatttcattaccaataacgtgatcgaaagcagcaggttcgtgtatctgatcaagtacgccaatgcccaaaagatcagggaggtggccaagaacgaaaaggtggtgatgttcgtgctgggcggcattcctgacacacagatcgaaaggtactacaagagctgtgtggagttccccgatatgaactccagcctgggcgtgaagagatccgaactggctaggatgatcaagaatattagcttcgacgacttcaagaacgtgaagcaacaggccaaaggaagggagaacgtcgccaaagagagagccaaggccgtgatcggactctacctgaccgtcatgtacctcctcgtgaagaacctggtgaacgtgaacgctagatacgtcatcgccatccattgcctcgagagggacttcggactgtacaaggagatcattcccgagctggccagcaaaaatctcaagaacgattacagaatcctgagccaaaccctgtgcgagctgtgtgacaagtcccccaacctgtttctgaagaagaatgaaaggctgagaaagtgcgtcgaagtcgacatcaacaacgctgacagctccatgaccaggaaatacgcgaactgtatcgccgctctgaccgtggtgagggaactcaaggagtacatcggagatatctgcaccgtggactcctacttcagcatttatcactacgtgatgcagaggtgcattaccaagagagaaaatgacacaaagcaggaggagaagattaagtacgaggacgatctgctgaaaaaccacggatacaccaaggatttcgtcaaggccctcaatagccccttcggctacaatatccctaggtttaaaaacctgagcatcgagcagctgtttgacagaaatgaatacctgacagagaag

SEQ ID NO: 120 - DNA, 2787 bp, Artificial Sequence
  Human codon-optimized uncultured Ruminococcus sp. nCas1 with N-terminal NLS
agccccaagaagaagagaaaggtggaggccagcgccaagaagaacaagatgaaacccagggagctgagagaggctcagaagaaggctaggcaactgaaagccgccgagatcaataacaatgccgcccctgccatcgccgctatgcccgctgccgaagtcatcgctcccgccgccgaaaagaagaagagctccgtgaaagccgctggaatgaagtccattctggtgtccgagaacaaaatgtatatcacctccttcggcaaaggcaattccgctgtgctggagtatgaggtggacaacaacgactacaatcagacccagctcagcagcaaggataactccaacatccagctgggcggcgtgaatgaagtgaatatcaccttcagcagcaagcacggatttgagtccggagtcgagattaacacaagcaaccctacccacaggtccggagaaagcagccctgtcagaggagacatgctgggactgaaaagcgagctggagaagagattctttggaaagacctttgatgacaatatccacatccagctcatttacaacatcctggatatcgagaaaatcctggccgtgtatgtgaccaacatcgtgtacgctctgaacaacatgctcggcgtcaagggcagcgagtcccacgacgactttattggctatctgtccaccaacaatatttacgatgtcttcattgaccccgacaacagcagcctctccgacgacaaaaaagccaacgtcaggaagagcctcagcaaattcaacgccctgctgaagaccaagaggctcggatactttggcctggaggaacccaagaccaaggacaacagagtgagccaggcctataagaaaagggtgtaccacatgctggccatcgtgggccagatcagacagtgcgtgttccatgacaagtccggcgccaagagattcgacctgtactccttcattaacaacatcgaccctgagtacagggatacactggattacctcgtggaggagaggctgaagagcatcaacaaagactttattgaggacaacaaagtcaacatcagcctgctgatcgatatgatgaagggctacgaagctgacgacatcatcaggctgtactatgatttcattgtcctgaagagccagaagaacctgggattctccattaagaaactgagagaaaagatgctcgacgagtacggcttcaggttcaaggacaagcagtatgacagcgtgagatccaagatgtacaagctgatggattttctcctgttttgcaactattacaggaacgacatcgccgccggcgaatccctggtcaggaaactgagattcagcatgaccgacgacgagaaggaaggcatctacgccgacgaagccgctaagctgtggggaaaatttagaaatgacttcgagaacatcgctgaccacatgaacggcgatgtgatcaaggagctcggcaaggctgacatggatttcgacgagaagatcctggattccgagaagaagaatgccagcgatctgctgtacttcagcaagatgatttacatgctcacatattttctcgatggcaaggagatcaacgatctcctgaccacactgatcagcaagttcgacaacattaaagagttcctcaaaattatgaaatccagcgccgtggatgtcgagtgcgaactcaccgccggctacaagctcttcaacgacagccagaggatcaccaatgagctgttcattgtgaaaaatatcgctagcatgaggaaacccgccgcctccgctaaactgacaatgtttagagatgccctcaccatcctgggcatcgacgataagatcacagacgacagaattagcggaatcctgaagctcaaggaaaagggcaagggaatccatggcctcagaaatttcattaccaataacgtgatcgaaagcagcaggttcgtgtatctgatcaagtacgccaatgcccaaaagatcagggaggtggccaagaacgaaaaggtggtgatgttcgtgctgggcggcattcctgacacacagatcgaaaggtactacaagagctgtgtggagttccccgatatgaactccagcctgggcgtgaagagatccgaactggctaggatgatcaagaatattagcttcgacgacttcaagaacgtgaagcaacaggccaaaggaagggagaacgtcgccaaagagagagccaaggccgtgatcggactctacctgaccgtcatgtacctcctcgtgaagaacctggtgaacgtgaacgctagatacgtcatcgccatccattgcctcgagagggacttcggactgtacaaggagatcattcccgagctggccagcaaaaatctcaagaacgattacagaatcctgagccaaaccctgtgcgagctgtgtgacaagtcccccaacctgtttctgaagaagaatgaaaggctgagaaagtgcgtcgaagtcgacatcaacaacgctgacagctccatgaccaggaaatacaggaactgtatcgcccatctgaccgtggtgagggaactcaaggagtacatcggagatatctgcaccgtggactcctacttcagcatttatcactacgtgatgcagaggtgcattaccaagagagaaaatgacacaaagcaggaggagaagattaagtacgaggacgatctgctgaaaaaccacggatacaccaaggatttcgtcaaggccctcaatagccccttcggctacaatatccctaggtttaaaaacctgagcatcgagcagctgtttgacagaaatgaatacctgacagagaag

SEQ ID NO: 121 - DNA, 2826 bp, Artificial Sequence
  Human codon-optimized uncultured Ruminococcus sp. nCas1 with N- and C-terminal NLS tags
agccccaagaagaagagaaaggtggaggccagcgccaagaagaacaagatgaaacccagggagctgagagaggctcagaagaaggctaggcaactgaaagccgccgagatcaataacaatgccgcccctgccatcgccgctatgcccgctgccgaagtcatcgctcccgccgccgaaaagaagaagagctccgtgaaagccgctggaatgaagtccattctggtgtccgagaacaaaatgtatatcacctccttcggcaaaggcaattccgctgtgctggagtatgaggtggacaacaacgactacaatcagacccagctcagcagcaaggataactccaacatccagctgggcggcgtgaatgaagtgaatatcaccttcagcagcaagcacggatttgagtccggagtcgagattaacacaagcaaccctacccacaggtccggagaaagcagccctgtcagaggagacatgctgggactgaaaagcgagctggagaagagattctttggaaagacctttgatgacaatatccacatccagctcatttacaacatcctggatatcgagaaaatcctggccgtgtatgtgaccaacatcgtgtacgctctgaacaacatgctcggcgtcaagggcagcgagtcccacgacgactttattggctatctgtccaccaacaatatttacgatgtcttcattgaccccgacaacagcagcctctccgacgacaaaaaagccaacgtcaggaagagcctcagcaaattcaacgccctgctgaagaccaagaggctcggatactttggcctggaggaacccaagaccaaggacaacagagtgagccaggcctataagaaaagggtgtaccacatgctggccatcgtgggccagatcagacagtgcgtgttccatgacaagtccggcgccaagagattcgacctgtactccttcattaacaacatcgaccctgagtacagggatacactggattacctcgtggaggagaggctgaagagcatcaacaaagactttattgaggacaacaaagtcaacatcagcctgctgatcgatatgatgaagggctacgaagctgacgacatcatcaggctgtactatgatttcattgtcctgaagagccagaagaacctgggattctccattaagaaactgagagaaaagatgctcgacgagtacggcttcaggttcaaggacaagcagtatgacagcgtgagatccaagatgtacaagctgatggattttctcctgttttgcaactattacaggaacgacatcgccgccggcgaatccctggtcaggaaactgagattcagcatgaccgacgacgagaaggaaggcatctacgccgacgaagccgctaagctgtggggaaaatttagaaatgacttcgagaacatcgctgaccacatgaacggcgatgtgatcaaggagctcggcaaggctgacatggatttcgacgagaagatcctggattccgagaagaagaatgccagcgatctgctgtacttcagcaagatgatttacatgctcacatattttctcgatggcaaggagatcaacgatctcctgaccacactgatcagcaagttcgacaacattaaagagttcctcaaaattatgaaatccagcgccgtggatgtcgagtgcgaactcaccgccggctacaagctcttcaacgacagccagaggatcaccaatgagctgttcattgtgaaaaatatcgctagcatgaggaaacccgccgcctccgctaaactgacaatgtttagagatgccctcaccatcctgggcatcgacgataagatcacagacgacagaattagcggaatcctgaagctcaaggaaaagggcaagggaatccatggcctcagaaatttcattaccaataacgtgatcgaaagcagcaggttcgtgtatctgatcaagtacgccaatgcccaaaagatcagggaggtggccaagaacgaaaaggtggtgatgttcgtgctgggcggcattcctgacacacagatcgaaaggtactacaagagctgtgtggagttccccgatatgaactccagcctgggcgtgaagagatccgaactggctaggatgatcaagaatattagcttcgacgacttcaagaacgtgaagcaacaggccaaaggaagggagaacgtcgccaaagagagagccaaggccgtgatcggactctacctgaccgtcatgtacctcctcgtgaagaacctggtgaacgtgaacgctagatacgtcatcgccatccattgcctcgagagggacttcggactgtacaaggagatcattcccgagctggccagcaaaaatctcaagaacgattacagaatcctgagccaaaccctgtgcgagctgtgtgacaagtcccccaacctgtttctgaagaagaatgaaaggctgagaaagtgcgtcgaagtcgacatcaacaacgctgacagctccatgaccaggaaatacaggaactgtatcgcccatctgaccgtggtgagggaactcaaggagtacatcggagatatctgcaccgtggactcctacttcagcatttatcactacgtgatgcagaggtgcattaccaagagagaaaatgacacaaagcaggaggagaagattaagtacgaggacgatctgctgaaaaaccacggatacaccaaggatttcgtcaaggccctcaatagccccttcggctacaatatccctaggtttaaaaacctgagcatcgagcagctgtttgacagaaatgaatacctgacagagaagggatccggacctaagaaaaagaggaaggtggcggccgct

SEQ ID NO: 122 - DNA, 2803 bp, Artificial Sequence
  Human codon-optimized Ruminococcus flavefaciens FD1 nCas1
aagaaaaaaatgagcctcagagagaagagggaagccgagaaacaagccaaaaaagccgcctacagcgctgcctccaaaaacacagatagcaaacctgctgagaagaaggccgagacacccaagcctgctgagattatttccgacaactccagaaacaaaaccgccgtcaaggccgccggcctgaaatccacaattatctccggcgataagctgtacatgaccagcttcggaaagggcaacgccgccgtgatcgagcagaaaattgatattaatgattactccttctccgccatgaaggatacccccagcctggaagtggacaaggccgagagcaaggagatctccttctccagccaccacccttttgtcaaaaatgataaactgaccacctataatcccctgtacggcggaaaagataaccccgaaaagcccgtgggcagagatatgctcggcctcaaagacaagctcgaggagaggtacttcggatgcaccttcaatgacaacctgcacattcagattatctataacatcctcgacattgagaaaattctggccgtgcactccgccaacattaccacagctctggaccacatggtggacgaggacgatgagaagtacctcaatagcgattacattggctacatgaacaccatcaacacctatgatgtgttcatggacccctccaaaaattcctccctctcccccaaggacaggaagaacattgataacagcagggccaagtttgagaagctcctgtccacaaagaggctcggctactttggctttgactacgatgccaacggcaaggataagaagaaaaacgaggagatcaagaaaaggctctatcacctgacagcctttgccggccagctcaggcagtggtccttccatagcgccggcaattatcccagaacctggctctacaagctcgatagcctggacaaagagtatctcgacaccctggaccattattttgataagagattcaacgatattaatgacgatttcgtcaccaagaacgccacaaacctgtacatcctgaaggaggtcttccccgaggctaatttcaaggatatcgccgatctctactacgatttcattgtcatcaaaagccataagaatatgggattttccatcaagaagctgagggagaagatgctggagtgcgatggagctgatagaatcaaggaacaggacatggactccgtgaggagcaagctgtataagctgatcgatttttgcattttcaaatactaccacgagttccctgagctgagcgagaagaacgtcgacatcctcagggctgccgtgagcgataccaaaaaggacaacctgtatagcgacgaggccgctaggctctggagcatcttcaaggaaaagttcctgggcttctgcgacaagattgtggtgtgggtgaccggcgagcacgagaaagacatcacctccgtgattgacaaggacgcttacaggaacaggtccaacgtgagctacttttccaagctgatgtacgccatgtgtttcttcctggatggaaaggaaattaacgatctgctgaccacactgatcaacaaattcgacaacattgccaaccagatcaagaccgccaaggagctcggcattaacaccgccttcgtgaaaaactacgattttttcaaccacagcgaaaagtacgtggacgagctgaacattgtgaaaaacatcgccaggatgaaaaagccctccagcaacgccaagaaggccatgtaccatgacgccctgacaatcctgggcatccccgaggatatggacgagaaggccctggatgaggagctcgatctcatcctggaaaagaagaccgatcccgtgaccggaaagcccctcaaaggcaaaaatcccctgaggaattttatcgctaataatgtgattgagaatagcaggttcatttacctgattaaattttgcaaccctgagaatgtcaggaaaatcgtgaacaacacaaaggtgaccgagttcgtgctcaagaggatccccgatgcccagatcgagaggtactacaagagctgtaccgattccgagatgaaccctcccacagaaaagaagatcaccgagctggccggcaagctgaaagatatgaattttggaaacttcaggaacgtgaggcagtccgccaaggaaaacatggagaaagagaggttcaaggccgtcattggcctgtacctcaccgtcgtctacagagtggtcaaaaacctggtggacgtcaatagcaggtacatcatggccttccatagcctggagagagattcccagctgtacaacgtgagcgtcgataatgattacctggccctcaccgacaccctggtcaaggagggcgacaacagcaggtccaggtacctggccggaaataaaaggctgagggattgcgtgaagcaagacatcgacaatgccaaaaagtggttcgtctccgacaagtacaactccattacaaagtacaggaacaacgtggcccacctgaccgccgtgagaaactgcgccgagttcatcggcgacattaccaagatcgactcctacttcgccctctaccactacctcattcagagacagctggctaagggcctcgatcatgagaggtccggattcgacaggaattacccccagtacgcccctctgttcaaatggcacacctacgtgaaggatgtcgtcaaggccctgaacgcccccttcggatacaatatccctaggttcaagaatctgagcatcgacgccctctttgataggaatgaaatcaagaagaacgatggcgagaagaagtccgacgactgagcct

SEQ ID NO: 123 - DNA, 2799 bp, Artificial Sequence
  Human codon-optimized Ruminococcus flavefaciens FD1 nCas1 HEPN-/-
aagaaaaaaatgagcctcagagagaagagggaagccgagaaacaagccaaaaaagccgcctacagcgctgcctccaaaaacacagatagcaaacctgctgagaagaaggccgagacacccaagcctgctgagattatttccgacaactccagaaacaaaaccgccgtcaaggccgccggcctgaaatccacaattatctccggcgataagctgtacatgaccagcttcggaaagggcaacgccgccgtgatcgagcagaaaattgatattaatgattactccttctccgccatgaaggatacccccagcctggaagtggacaaggccgagagcaaggagatctccttctccagccaccacccttttgtcaaaaatgataaactgaccacctataatcccctgtacggcggaaaagataaccccgaaaagcccgtgggcagagatatgctcggcctcaaagacaagctcgaggagaggtacttcggatgcaccttcaatgacaacctgcacattcagattatctataacatcctcgacattgagaaaattctggccgtgcactccgccaacattaccacagctctggaccacatggtggacgaggacgatgagaagtacctcaatagcgattacattggctacatgaacaccatcaacacctatgatgtgttcatggacccctccaaaaattcctccctctcccccaaggacaggaagaacattgataacagcagggccaagtttgagaagctcctgtccacaaagaggctcggctactttggctttgactacgatgccaacggcaaggataagaagaaaaacgaggagatcaagaaaaggctctatcacctgacagcctttgccggccagctcgcgcagtggtccttcgctagcgccggcaattatcccagaacctggctctacaagctcgatagcctggacaaagagtatctcgacaccctggaccattattttgataagagattcaacgatattaatgacgatttcgtcaccaagaacgccacaaacctgtacatcctgaaggaggtcttccccgaggctaatttcaaggatatcgccgatctctactacgatttcattgtcatcaaaagccataagaatatgggattttccatcaagaagctgagggagaagatgctggagtgcgatggagctgatagaatcaaggaacaggacatggactccgtgaggagcaagctgtataagctgatcgatttttgcattttcaaatactaccacgagttccctgagctgagcgagaagaacgtcgacatcctcagggctgccgtgagcgataccaaaaaggacaacctgtatagcgacgaggccgctaggctctggagcatcttcaaggaaaagttcctgggcttctgcgacaagattgtggtgtgggtgaccggcgagcacgagaaagacatcacctccgtgattgacaaggacgcttacaggaacaggtccaacgtgagctacttttccaagctgatgtacgccatgtgtttcttcctggatggaaaggaaattaacgatctgctgaccacactgatcaacaaattcgacaacattgccaaccagatcaagaccgccaaggagctcggcattaacaccgccttcgtgaaaaactacgattttttcaaccacagcgaaaagtacgtggacgagctgaacattgtgaaaaacatcgccaggatgaaaaagccctccagcaacgccaagaaggccatgtaccatgacgccctgacaatcctgggcatccccgaggatatggacgagaaggccctggatgaggagctcgatctcatcctggaaaagaagaccgatcccgtgaccggaaagcccctcaaaggcaaaaatcccctgaggaattttatcgctaataatgtgattgagaatagcaggttcatttacctgattaaattttgcaaccctgagaatgtcaggaaaatcgtgaacaacacaaaggtgaccgagttcgtgctcaagaggatccccgatgcccagatcgagaggtactacaagagctgtaccgattccgagatgaaccctcccacagaaaagaagatcaccgagctggccggcaagctgaaagatatgaattttggaaacttcaggaacgtgaggcagtccgccaaggaaaacatggagaaagagaggttcaaggccgtcattggcctgtacctcaccgtcgtctacagagtggtcaaaaacctggtggacgtcaatagcaggtacatcatggccttccatagcctggagagagattcccagctgtacaacgtgagcgtcgataatgattacctggccctcaccgacaccctggtcaaggagggcgacaacagcaggtccaggtacctggccggaaataaaaggctgagggattgcgtgaagcaagacatcgacaatgccaaaaagtggttcgtctccgacaagtacaactccattacaaagtacgcgaacaacgtggccgccctgaccgccgtgagaaactgcgccgagttcatcggcgacattaccaagatcgactcctacttcgccctctaccactacctcattcagagacagctggctaagggcctcgatcatgagaggtccggattcgacaggaattacccccagtacgcccctctgttcaaatggcacacctacgtgaaggatgtcgtcaaggccctgaacgcccccttcggatacaatatccctaggttcaagaatctgagcatcgacgccctctttgataggaatgaaatcaagaagaacgatggcgagaagaagtccgacgactga

SEQ ID NO: 124 - DNA, 2757 bp, Artificial Sequence
  Ruminococcus bicirculans nCas1 sequence
atggcaaaaaagaataaaatgaagcctagagagctgcgtgaggctcagaaaaaagccagacagctcaaagcggctgagataaataataacgctgttcctgcaatcgctgccatgcctgctgcagaggctgctgcacctgcggcagagaagaaaaaatcctccgtaaaggcggcaggaatgaagtctattcttgtcagtgaaaataaaatgtacataacctctttcggcaagggcaattctgcggtgcttgaatatgaggtggataataatgactacaacaaaactcagctttcctcaaaggacaacagtaatatcgagctctgtgatgtaggcaaagtaaacatcactttttcgagcagacgtggctttgagagcggtgtggagataaacacttcaaaccctactcacagaagcggtgaaagctcgtctgtaagaggggatatgctggggcttaaatcggagcttgaaaagcgctttttcggcaagaattttgatgataatatacatatccagcttatttacaacattctggatatcgaaaagatacttgcagtgtatgtgacgaatatcgtttatgcactgaacaatatgcttggggaaggcgatgagagcaattacgatttcatggggtatctttccacatttaacacttataaagtttttactaatcctaatggcagcactttatccgacgataagaaagagaatatcagaaaaagtcttagcaaattcaatgccctgctgaaaactaagcgtcttggctatttcggccttgaagagccaaagacaaaggatacaagagcttcggaagcatacaaaaagcgtgtttatcatatgcttgcaattgtggggcagataagacagtgtgtttttcatgataaatcgggtgcaaaaagatttgacctttacagttttattaacaatattgatcccgaatacagagaaacccttgactatcttgtagatgagagatttgattctataaataagggctttatccagggcaacaaggtcaatatcagcttgcttattgatatgatgaaaggctatgaggctgatgatatcatacgcctttattacgatttcattgtgcttaaatctcagaaaaatctcggtttttctatcaaaaagcttcgtgagaaaatgctggacgaatacggcttcagatttaaggacaagcaatatgactctgtgcgctcaaagatgtacaagcttatggattttctgcttttctgcaactactacagaaatgacattgccgcaggcgaatctcttgtgcgcaaactgcgtttttcaatgaccgatgatgaaaaagaggggatatatgctgatgaagcggcaaagctttggggcaaattcaggaatgattttgaaaatatcgccgaccacatgaacggtgacgttatcaaggagcttggcaaggctgacatggattttgatgagaaaattcttgacagcgaaaagaagaatgcgtctgaccttttgtatttctccaaaatgatatatatgctcacatattttcttgacggcaaggagataaacgaccttcttacaacgcttatcagcaagtttgataacatcaaggagtttttgaagataatgaaaagctctgctgttgatgttgagtgtgaacttacggcgggctacaagctgttcaatgacagccagaggataaccaacgagctttttatcgtaaagaacattgcttccatgagaaagcctgcggcttcggcgaagcttacgatgttccgtgacgcactgactatactcggtatagacgacaagatcacggacgataggataagcgagattctaaaacttaaagaaaaaggcaagggcatacatggcctgagaaatttcataacaaacaatgttatcgagtcctctcggtttgtataccttatcaagtatgcgaacgctcagaagataagagaagtggctaagaatgagaaagttgtcatgtttgttcttgggggtatccctgacacgcagatagagcgttattacaagagttgtgtggaatttcctgacatgaacagttctttgggagtaaagcgcagtgagcttgcgagaatgataaagaacatcagctttgatgatttcaaaaatgtgaaacagcaggcaaagggcagagaaaacgtggctaaggagagggcaaaggctgttatcgggctttatcttacggtcatgtatctgctggtgaaaaatcttgtgaatgtcaatgcaaggtatgttattgcgatacactgccttgaacgtgattttgggctgtataaggagataattcctgagttggcttcaaagaacttgaaaaatgactacaggatactttcacagacgctttgtgaactttgtgataagtcgccgaatttgttcttgaaaaagaacgagcggctgcgcaagtgcgttgaagttgatatcaataatgcagacagcagcatgacaagaaaataccgcaactgtattgctcatcttactgtagttcgtgaactgaaagaatacataggagatatttgtacagtggattcttacttctccatttatcattatgttatgcagcgctgtatcacgaaaagggaaaatgacacaaagcaagaagagaaaataaagtatgaggacgatcttttaaaaaatcacggctatacgaaagactttgtaaaggctctcaactcgccgtttggatacaacattccgaggtttaaaaatctttcaattgagcagttgtttgacagaaatgaatatcttactgaaaagtag

SEQ ID NO: 125 - DNA, 2865 bp, Artificial Sequence
  Eubacterium siraeum nCas1 sequence
atgggtaagaaaatacacgcacgagatctcagagaacaaagaaagaccgatagaacggaaaaatttgcagatcagaacaaaaaacgtgaagcagagagggcagttccgaaaaaagacgcagccgtttctgtaaaatcagtttcttctgtttcatcaaaaaaagacaatgtaacaaaatctatggctaaagccgcaggcgtgaagtcggtttttgctgtaggaaatactgtttatatgacttcattcggcagaggaaacgatgctgtacttgagcagaaaatagtcgatacatcgcacgaaccgctgaatattgacgatcctgcatatcagttgaacgttgtcacaatgaacggttattcggttaccggtcacagaggtgaaacggtatctgccgtaacggataatccgctgcgccgttttaacggaagaaagaaagatgaaccggaacagtctgtgcctacggatatgctgtgcctgaaaccgactcttgaaaagaaattcttcggcaaagaattcgatgataatatacatatccagcttatttacaatattcttgacattgaaaaaatactggcggtttattcgaccaacgctatttacgcattgaataatatgagtgctgacgaaaatatcgaaaacagcgatttcttcatgaaacgtaccaccgatgaaacctttgacgattttgaaaagaaaaaggagagtacaaacagtcgagagaaagccgattttgacgcatttgaaaaattcatcggcaattacaggctggcttattttgccgatgcattttatgtaaataaaaagaatcccaaaggtaaagcaaaaaatgttctgcgtgaggataaagaactttactccgtgctcactctgatcggtaaactgcgtcattggtgtgttcacagtgaggagggcagagcagaattctggctgtataagctcgatgaacttaaagatgatttcaaaaatgtactcgacgttgtttataaccgtcctgttgaagaaataaacaaccgctttatagaaaacaataaggtaaacatacagatactgggctcggtatacaagaacaccgatattgccgaacttgtaaggtcatattacgaatttcttatcacaaagaagtataaaaatatgggcttttcaataaagaagctccgtgagagtatgctcgaaggtaaaggttacgccgataaagaatatgattctgtaaggaataagctgtatcagatgacggatttcatcttatacacaggatatatcaacgaagacagcgatagagccgacgatcttgtgaacactttgagaagttcgctcaaagaggatgataagacaaccgtatattgcaaggaagcggattatctgtggaaaaaataccgtgaatccataagagaggttgccgatgcgcttgatggcgataacattaaaaagctgagcaaatcgaatattgaaattcaggaagacaagctgagaaaatgttttatcagctatgccgacagcgtatcggaatttaccaagcttatttatctgctgacaagatttttaagcggtaaggagatcaacgatcttgtcacaacgctgataaacaagtttgacaatatcagaagcttccttgaaataatggacgagcttgggcttgacaggaccttcaccgccgagtacagcttctttgaaggcagtacaaagtatcttgccgagcttgtcgagcttaacagctttgtgaaatcgtgttcgtttgatataaacgcaaaaagaacaatgtatcgcgatgcgctggatattctcggcattgaatcggataagaccgaagaagatattgagaagatgatcgataatatccttcagatcgacgcaaacggtgataaaaagctcaagaaaaacaacggtctgagaaatttcattgcaagtaacgttatagattcaaaccgattcaagtaccttgtgcggtacggaaatccaaagaagattcgtgaaacggcaaaatgcaagcccgctgtaaggtttgtgctgaatgagatcccggacgcacagatcgaaagatattatgaggcttgttgcccaaaaaatacagctttatgctctgcaaataagagacgtgagaaactggctgatatgatagctgaaataaagtttgagaatttttcggatgccggcaattatcagaaagcaaatgtcacatcaagaacgtctgaagctgaaatcaagcggaagaatcaggctataatccgtctttatcttaccgttatgtacattatgctgaagaaccttgtaaatgtgaacgccagatacgttatcgctttccattgcgttgaaagggatacgaagctgtatgcggaaagcggtctggaagtcggtaatatagaaaaaaacaagacaaatcttactatggctgtaatgggagtcaagctcgaaaacggaatcataaaaacggaatttgacaagagctttgcagaaaatgccgcaaacagatatctcaggaatgcacgctggtacaagctgatactggataatttaaagaagtcggaaagagcggttgtcaatgagttcagaaatactgtctgccatctgaatgcgataaggaatatcaatatcaatatcaaggaaataaaagaggtcgagaactactttgctctgtaccactacctcattcagaaacatctcgaaaatcgttttgccgataaaaaagtagaaagagacaccggcgattttataagcaagctcgaagaacacaagacttactgcaaggactttgtaaaagcatattgtacgcctttcggatataaccttgtgagatataaaaaccttacgatagacgggctgtttgataagaattaccccggaaaagacgattctgatgaacagaaataa

SEQ ID NO: 126 - DNA, 2799 bp, Artificial Sequence
  Ruminococcus flavefaciens FD1 nCas1 sequence
atgaaaaagaaaatgtctctccgtgaaaagcgtgaagccgagaaacaggctaaaaaagctgcatattcagcagcttcaaaaaatacagattctaagcctgcggaaaagaaagcagaaactccaaagcctgcggagattatttccgataattccagaaataagaccgctgtaaaggcggctggtctgaaatcaacaattatcagcggcgataagctgtatatgacatctttcggcaagggtaacgctgctgttattgagcagaaaatagatatcaatgattattctttttcagctatgaaagatactccgtcgcttgaagttgataaagcagaatcaaaagagatctctttttcaagtcaccatccttttgtaaagaatgataagctgacaacatataaccctttatacggcggcaaggataaccccgaaaagcctgtcggcagggatatgctcggcttaaaagataagcttgaagaacgctatttcggatgtacattcaatgataatcttcacatccagattatctataacatacttgacatcgagaagattttagctgttcattctgcaaatatcacaactgcgcttgaccacatggttgatgaagacgatgaaaaatatcttaacagcgattatatcggctacatgaataccataaatacatatgacgtgtttatggatccttcaaagaattcttcattaagccctaaagatagaaagaatattgacaacagccgtgcaaaatttgagaaactgctttcaactaagcgccttggctattttggatttgactatgatgcaaacggtaaggacaagaaaaagaacgaggaaataaaaaagcgtttatatcatctcacagcttttgcaggtcagctccgtcagtggagttttcatagtgctggcaattatccgagaacatggctttacaagctcgattcactggataaggaatatcttgatactcttgaccattacttcgataaacgttttaacgatataaacgatgatttcgtaactaagaatgctaccaatctctatattctgaaagaagtatttcccgaagcaaacttcaaggatattgccgatctttattacgatttcatagttataaagtcgcacaaaaatatgggattctccataaaaaagctgagggagaagatgcttgaatgtgatggtgcagacaggataaaagaacaggatatggactctgttcgctcaaagctgtataagctcatagacttttgcattttcaagtattatcacgaatttcctgaacttagtgaaaagaatgtggatatactcagagcggctgtatccgatacaaaaaaagataacctttattctgatgaggctgcacgtttatggagcatatttaaagaaaaattcctcggcttctgtgataagatagttgtatgggtaacaggagagcatgagaaagatatcacatccgttattgataaggatgcttacaggaacaggagcaatgtttcatatttctcaaagctgatgtatgcaatgtgctttttccttgacggaaaagagataaatgaccttctcactactcttatcaacaaattcgataatatcgctaaccagataaaaacagccaaagaacttggcattaatactgcttttgtaaagaattacgatttcttcaatcacagcgagaaatatgtcgatgaactgaacatcgtcaagaatattgcaagaatgaagaagccttcaagtaatgccaaaaaagctatgtatcatgatgcgcttactattctcggaatacctgaggatatggatgaaaaagctcttgatgaggaactggatttaattcttgaaaaaaagacagacccagtaactggcaagccactgaaaggtaagaatcctttacgtaattttatcgcaaacaatgtgatagagaattcaagattcatatatcttatcaagttctgcaatcctgagaatgtacgtaaaatcgtgaataatacaaaggtcactgagtttgtgttaaagcgtattcccgatgctcagatcgaacgctattataagtcgtgtacagattctgaaatgaatccgcctactgaaaagaagatcaccgaacttgctggtaagttaaaggatatgaactttggcaacttccgaaatgtgagacagtctgctaaagagaatatggagaaggagcgcttcaaagctgttatagggctttatctcacggtagtatatcgtgttgtcaagaatcttgttgatgtaaactcacgatatatcatggcttttcattcgcttgaacgtgattcacaactgtataacgtatctgttgataatgattatcttgcacttaccgatactcttgttaaggagggagataattccagaagcagatatcttgcaggcaacaagcgtctgagagattgtgtgaagcaggatatcgataatgcaaaaaagtggtttgttagtgataagtacaatagcataaccaagtacaggaataacgttgcccatcttaccgctgtacgtaactgcgctgaattcatcggagatataacgaagatagactcctattttgcattgtatcattatctcattcagagacagcttgcgaaaggtcttgaccatgagcgaagtggctttgacagaaactatccacagtatgcaccgctgtttaagtggcatacgtatgtaaaggatgttgtcaaggctctgaatgctccatttggctacaatatccctcgtttcaagaatctcagcatagatgcactttttgaccgcaacgaaataaagaagaatgacggcgagaaaaaatccgatgat

SEQ ID NO: 127 - DNA, 2835 bp, Artificial Sequence
  Ruminococcus albus nCas1 sequence
atggcaaaaaaatcgaaaggtatgagccttagagaaaaacgtgaacttgaaaagcagaaaaggatacaaaaggcagctgtgaattcagttaatgatacacctgaaaaaacagaagaagcaaatgtcgtatctgtaaatgtcaggacatcggctgagaataagcatagtaaaaaatctgctgccaaagctttgggactgaaatccgggctggttatcggtgatgagctgtaccttacttcattcggcagaggtaacgaagcaaagcttgaaaagaagatatccggtgacactgtcgaaaaacttggcattggtgcttttgaagtcgccgaacgtgacgaatcaacgcttaccctcgaaagtggcaggataaaggacaagaccgccagacccaaagaccccagacatataaccgtcgatacacaaggtaaattcaaggaagatatgcttgggatacgcagtgtactggagaaaaagatatttggcaaaacatttgatgataatatccatgttcagcttgcgtacaatatcctggatgtcgaaaagataatggcacagtatgtcagcgatatcgtatatatgctgcataatactgataaaacagaaagaaacgataatcttatggggtatatgagcatcaggaatacctataagacattttgtgatacgtcaaatcttcccgatgatacaaaacaaaaagttgaaaatcagaagagagagtttgacaagatcataaaaagcggcagacttgggtatttcggcgaagcttttatggtaaacagcggcaatagtaccaagcttagacccgagaaagagatatatcatatctttgcgcttatggcgagcctgaggcagagttactttcacggatatgtaaaagataccgattatcagggaaccacatgggcatatactcttgaggacaagctgaaaggtccgagccatgagttcagggaaaccattgataagatatttgatgagggattcagcaagatcagcaaggactttggcaagatgaacaaggtcaaccttcagatacttgaacagatgattggtgaactgtatggcagtatagaacgacaaaacctcacttgcgattactatgacttcattcaactgaaaaagcataagtatcttggattttctataaagcgtcttagagagaccatgcttgaaacaacaccggctgaatgttataaagctgaatgctataacagcgagcgtcaaaagctgtataagctgatagatttcctgatatatgatctttactataaccgtaagcctgcacgcatcgaagaaatcgtggacaagctgagggaatctgtgaacgacgaagagaaagaatccatatattcagttgaggcgaagtatgtctatgaatcacttagcaaagttctggataaatcgctgaaaaacagtgtgtctggtgaaacgataaaggatctccaaaagagatatgatgacgaaacagcaaacaggatctgggatatctcacagcacagtataagtggaaatgtcaactgtttctgcaagctaatttatattatgaccctgatgcttgacggcaaggagataaatgatctgctgacaacgctggtaaacaagttcgataacatagcatcatttatagatgttatggacgaacttggcttggagcatagttttacagataactataaaatgtttgccgacagcaaggctatatgccttgatctgcagttcataaacagttttgcacgtatgtcaaagatcgatgatgagaagtcaaaaagacagcttttccgtgatgcgcttgtcatactggatatcggtaataaagatgagacttggataaataattatctggattctgatattttcaaactggacaaagaaggtaacaagttaaagggcgcaaggcatgatttcaggaactttatagccaataatgttataaagtcatcacgtttcaaatacctagtaaaatacagcagtgccgatggtatgataaagctgaaaacgaatgaaaagctgataggctttgttctggataagcttccagaaacgcagatagaccgctactatgaatcatgcggacttgacaatgcggtagtagataagaaagtcaggatagaaaagctatcggggcttatcagagatatgaagttcgatgatttcagcggtgtcaaaacctcaaacaaagcaggagataatgacaaacaggataaggcgaaatatcaggcgataataagcctgtacctcatggtgctgtatcagatagtcaagaacatgatatatgtcaactcacgttatgttatcgctttccattgtcttgaacgtgactttggtatgtatggaaaagattttggaaagtattatcaaggctgccgaaaacttacagatcattttattgaagaaaagtacatgaaagagggtaaacttggctgcaataaaaaagtcggcagatatctgaaaaataatatttcctgctgcactgatggactgataaatacctaccgtaatcaggttgatcactttgcagtggtaaggaagataggcaactatgcggcatatatcaagagtatcggttcgtggtttgaactttatcactatgtaatacagaggatagtttttgacgaatacagatttgcacttaacaacactgaaagcaactataagaacagcatcatcaagcaccatacctactgtaaggatatggtcaaggcactgaacacacctttcggttatgacctgccgagatacaagaatctttctatcggtgatctgtttgatcgcaataattatctgaataaaacaaaagagtcaatagatgcaaatagctctattgacagtcagtga

SEQ ID NO: 128 - DNA, 2904 bp, Artificial Sequence
  Ruminococcus flavefaciens XPD nCas1 sequence
atgatcgaaaagaagaagtcatttgcaaagggcatgggagtaaaatcaacacttgtatccggttcaaaggtatacatgacgacgttcgcagaaggaagcgatgccagacttgaaaagatcgttgaaggcgattctatcagatctgtcaacgaaggagaagcgttctcagctgaaatggctgataagaatgcaggctacaagatcggtaacgcaaagttcagccacccaaagggctatgctgtagttgcaaacaaccccttatacaccggaccggtacagcaggatatgctcggtctgaaggaaacgcttgaaaagagatattttggagagtctgccgacggaaatgataatatctgtattcaggtcatccataatatcctcgatatcgaaaagatcctcgctgaatatataaccaatgctgcttatgcggtaaacaatatttccggtcttgataaggatatcatcggttttggtaagttcagtacggtctatacttatgatgagttcaaggatcctgaacatcacagagcagctttcaacaataacgataagttaattaatgccatcaaggcacagtatgatgaatttgacaatttccttgataatcctcgtctcggctactttggacaggcttttttcagtaaggaaggcagaaattacattatcaattacggcaacgagtgttatgatattcttgctttactcagcggattgcgtcactgggtagtacataataatgaggaagaatcaaggatttcccgtacatggctttataatctcgacaagaatcttgacaacgaatatatctctactctcaattatctgtatgatagaattacaaacgaattaacaaattccttctcaaagaatagtgcagccaacgtaaactatatcgctgaaacccttggtattaatcctgctgaatttgcagagcagtatttcagattcagtatcatgaaggaacagaagaatctcggtttcaatattactaagctgagagaagtaatgcttgacagaaaggatatgtctgagatccgtaaaaatcataaggtctttgattcaatccgtactaaggtctatactatgatggatttcgttatctacagatattacattgaagaggatgcaaaggttgctgctgccaacaagtctctgccggataacgaaaaaagcctcagtgaaaaggatatctttgttataaatctcagaggaagctttaacgatgatcagaaggatgccctttattatgatgaggccaatcgtatttggagaaagctcgaaaacattatgcacaatatcaaggaattcagaggcaataagacacgtgaatacaagaagaaggatgctccaagactccccagaattcttcctgccggaagggatgtttccgcgttctcaaagttgatgtacgctcttaccatgttccttgatggtaaggagatcaatgatcttctcaccacgctcatcaataagttcgataacatccagagtttcctcaaggtaatgcctcttatcggagtgaatgcaaagtttgttgaggaatatgccttcttcaaggacagcgcaaagattgctgacgaactcaggctgattaagagctttgccagaatgggagaacctatcgcagatgcaagacgtgctatgtatatcgatgctatcaggattctcggaacaaacctcagctatgatgagcttaaggcccttgccgatactttttcgcttgatgaaaacggcaacaagcttaagaagggcaagcacggcatgagaaacttcatcattaataatgtaatcagtaacaagcgcttccattatctcattcgttacggtgatcctgcacatctccatgagatcgccaagaatgaagctgttgtaaagttcgtcctcggcaggatagctgatatccagaagaagcagggacagaacggaaagaatcagatcgacaggtactatgagacctgtatcggcaaggacaagggcaagtctgtctccgaaaaggttgatgccctcacaaagattatcaccggtatgaactacgatcagttcgataagaagagaagcgttattgaggatactggaagagaaaacgctgagagagaaaagttcaagaagatcatcagcctctatcttactgtcatttatcacatccttaagaatattgttaatatcaatgcgcgttacgttatcggcttccattgcgttgagcgtgatgcacagctctataaggaaaagggctatgatatcaacctcaagaagctcgaagaaaaggggttttcatcagtcacaaagctgtgtgcaggtattgatgagactgctcctgacaagcgtaaggatgttgaaaaggaaatggctgagcgtgcaaaggaatctatcgatagccttgaatctgcaaatcctaagctttacgcaaactatatcaagtattctgacgagaagaaggctgaggaatttactagacagatcaaccgtgagaaggcaaagaccgctctgaatgcatatctcagaaatactaagtggaatgtgataatcagggaagatcttcttagaatcgataataagacatgtacgctctttagaaataaggccgttcatcttgaagttgcaagatatgttcatgcatatatcaacgatattgccgaagtaaacagctatttccagctttatcattacatcatgcagagaatcatcatgaacgaaagatatgaaaagtcttctggaaaggtaagcgaatacttcgatgctgtgaacgatgaaaagaagtacaacgacaggcttctgaagctgttgtgcgttccatttggttactgcatcccgagattcaagaatctctccattgaagctttgttcgacaggaacgaagcagctaagtttgacaaggaaaagaagaaagtatcaggtaattcatag

SEQ ID NO: 129 - DNA, 36 bp, Artificial Sequence
  Consensus Direct repeat
gaactacacccgtgcaaaaatgcaggggtctaaaac

SEQ ID NO: 130 - DNA, 36 bp, Artificial Sequence
  Consensus Direct repeat
ctactacactggtgcaaatttgcactagtctaaaac

SEQ ID NO: 131 - RNA, 36 nt, Artificial Sequence
  Consensus Direct repeat
caaguaaaccccuaccaacuggucgggguuugaaac

SEQ ID NO: 132 - RNA, 36 nt, Artificial Sequence
  Consensus Direct repeat
cuacuacacuggugcgaauuugcacuagucuaaaac

SEQ ID NO: 133 - RNA, 36 nt, Artificial Sequence
  Consensus Direct repeat
gaacuauaguagugugaauuuacacuacucuaaaac

SEQ ID NO: 134 - RNA, 36 nt, Artificial Sequence
  Consensus Direct repeat
cuacuauacuagugugauuuuacacuagucuaaaac

SEQ ID NO: 135 - RNA, 36 nt, Artificial Sequence
  Consensus Direct repeat
gaccaacaccucugcaaaacugcaggggucuaaaac

SEQ ID NO: 136 - RNA, 36 nt, Artificial Sequence
  Consensus Direct repeat
gcacuacaccccccugaaacaugaggggucuaaaac

SEQ ID NO: 137 - DNA, 36 bp, Artificial Sequence
  Consensus Direct repeat
gcactacacccccctgaaacatgaggggtctaaaac

SEQ ID NO: 138 - protein, 966 aa, Artificial Sequence
  50 percent consensus sequence for 7 full-length nCas1 orthologues
  misc_feature (2)..(4): Xaa can be any naturally occurring amino acid
  misc_feature (13)..(13): Xaa can be any naturally occurring amino acid
  misc_feature (22)..(23): Xaa can be any naturally occurring amino acid
  misc_feature (25)..(25): Xaa can be any naturally occurring amino acid
  misc_feature (32)..(33): Xaa can be any naturally occurring amino acid
  misc_feature (39)..(40): Xaa can be any naturally occurring amino acid
  misc_feature (43)..(44): Xaa can be any naturally occurring amino acid
  misc_feature (46)..(56): Xaa can be any naturally occurring amino acid
  misc_feature (60)..(60): Xaa can be any naturally occurring amino acid
  misc_feature (69)..(70): Xaa can be any naturally occurring amino acid
  misc_feature (72)..(72): Xaa can be any naturally occurring amino acid
  misc_feature (74)..(76): Xaa can be any naturally occurring amino acid
  misc_feature (83)..(83): Xaa can be any naturally occurring amino acid
  misc_feature (86)..(86): Xaa can be any naturally occurring amino acid
  misc_feature (88)..(88): Xaa can be any naturally occurring amino acid
  misc_feature (94)..(95): Xaa can be any naturally occurring amino acid
  misc_feature (97)..(108): Xaa can be any naturally occurring amino acid
  misc_feature (110)..(135): Xaa can be any naturally occurring amino acid
  misc_feature (139)..(147): Xaa can be any naturally occurring amino acid
  misc_feature (149)..(150): Xaa can be any naturally occurring amino acid
  misc_feature (157)..(158): Xaa can be any naturally occurring amino acid
  misc_feature (162)..(162): Xaa can be any naturally occurring amino acid
  misc_feature (167)..(167): Xaa can be any naturally occurring amino acid
  misc_feature (191)..(192): Xaa can be any naturally occurring amino acid
  misc_feature (201)..(209): Xaa can be any naturally occurring amino acid
  misc_feature (211)..(211): Xaa can be any naturally occurring amino acid
  misc_feature (213)..(214): Xaa can be any naturally occurring amino acid
  misc_feature (216)..(217): Xaa can be any naturally occurring amino acid
  misc_feature (220)..(221): Xaa can be any naturally occurring amino acid
  misc_feature (225)..(225): Xaa can be any naturally occurring amino acid
  misc_feature (227)..(228): Xaa can be any naturally occurring amino acid
  misc_feature (230)..(242): Xaa can be any naturally occurring amino acid
  misc_feature (244)..(249): Xaa can be any naturally occurring amino acid
  misc_feature (251)..(251): Xaa can be any naturally occurring amino acid
  misc_feature (253)..(257): Xaa can be any naturally occurring amino acid
  misc_feature (264)..(264): Xaa can be any naturally occurring amino acid
  misc_feature (267)..(270): Xaa can be any naturally occurring amino acid
  misc_feature (273)..(280): Xaa can be any naturally occurring amino acid
  misc_feature (283)..(283): Xaa can be any naturally occurring amino acid
  misc_feature (285)..(285): Xaa can be any naturally occurring amino acid
  misc_feature (290)..(292): Xaa can be any naturally occurring amino acid
  misc_feature (296)..(298): Xaa can be any naturally occurring amino acid
  misc_feature (300)..(310): Xaa can be any naturally occurring amino acid
  misc_feature (314)..(314): Xaa can be any naturally occurring amino acid
  misc_feature (316)..(318): Xaa can be any naturally occurring amino acid
  misc_feature (320)..(321): Xaa can be any naturally occurring amino acid
  misc_feature (323)..(325): Xaa can be any naturally occurring amino acid
  misc_feature (329)..(331): Xaa can be any naturally occurring amino acid
  misc_feature (333)..(337): Xaa can be any naturally occurring amino acid
  misc_feature (340)..(341): Xaa can be any naturally occurring amino acid
  misc_feature (343)..(345): Xaa can be any naturally occurring amino acid
  misc_feature (350)..(352): Xaa can be any naturally occurring amino acid
  misc_feature (354)..(357): Xaa can be any naturally occurring amino acid
  misc_feature (359)..(368): Xaa can be any naturally occurring amino acid
  misc_feature (373)..(375): Xaa can be any naturally occurring amino acid
  misc_feature (377)..(378): Xaa can be any naturally occurring amino acid
  misc_feature (391)..(391): Xaa can be any naturally occurring amino acid
  misc_feature (394)..(397): Xaa can be any naturally occurring amino acid
  misc_feature (399)..(404): Xaa can be any naturally occurring amino acid
  misc_feature (411)..(411): Xaa can be any naturally occurring amino acid
  misc_feature (415)..(415): Xaa can be any naturally occurring amino acid
  misc_feature (417)..(417): Xaa can be any naturally occurring amino acid
  misc_feature (420)..(420): Xaa can be any naturally occurring amino acid
  misc_feature (423)..(424): Xaa can be any naturally occurring amino acid
  misc_feature (426)..(427): Xaa can be any naturally occurring amino acid
  misc_feature (429)..(433): Xaa can be any naturally occurring amino acid
  misc_feature (435)..(436): Xaa can be any naturally occurring amino acid
  misc_feature (438)..(439): Xaa can be any naturally occurring amino acid
  misc_feature (442)..(442): Xaa can be any naturally occurring amino acid
  misc_feature (444)..(445): Xaa can be any naturally occurring amino acid
  misc_feature (447)..(447): Xaa can be any naturally occurring amino acid
  misc_feature (450)..(452): Xaa can be any naturally occurring amino acid
  misc_feature (454)..(455): Xaa can be any naturally occurring amino acid
  misc_feature (458)..(459): Xaa can be any naturally occurring amino acid
  misc_feature (462)..(477): Xaa can be any naturally occurring amino acid
  misc_feature (479)..(481): Xaa can be any naturally occurring amino acid
  misc_feature (483)..(485): Xaa can be any naturally occurring amino acid
  misc_feature (487)..(487): Xaa can be any naturally occurring amino acid
  misc_feature (489)..(489): Xaa can be any naturally occurring amino acid
  misc_feature (491)..(506): Xaa can be any naturally occurring amino acid
  misc_feature (509)..(510): Xaa can be any naturally occurring amino acid
  misc_feature (517)..(517): Xaa can be any naturally occurring amino acid
  misc_feature (520)..(520): Xaa can be any naturally occurring amino acid
  misc_feature (542)..(542): Xaa can be any naturally occurring amino acid
  misc_feature (546)..(546): Xaa can be any naturally occurring amino acid
  misc_feature (549)..(549): Xaa can be any naturally occurring amino acid
  misc_feature (554)..(556): Xaa can be any naturally occurring amino acid
  misc_feature (558)..(560): Xaa can be any naturally occurring amino acid
  misc_feature (562)..(563): Xaa can be any naturally occurring amino acid
  misc_feature (565)..(566): Xaa can be any naturally occurring amino acid
  misc_feature (568)..(569): Xaa can be any naturally occurring amino acid
  misc_feature (571)..(572): Xaa can be any naturally occurring amino acid
  misc_feature (575)..(577): Xaa can be any naturally occurring amino acid
  misc_feature (580)..(580): Xaa can be any naturally occurring amino acid
  misc_feature (584)..(584): Xaa can be any naturally occurring amino acid
  misc_feature (587)..(589): Xaa can be any naturally occurring amino acid
  misc_feature (593)..(593): Xaa can be any naturally occurring amino acid
  misc_feature (600)..(600): Xaa can be any naturally occurring amino acid
  misc_feature (605)..(612): Xaa can be any naturally occurring amino acid
  misc_feature (614)..(616): Xaa can be any naturally occurring amino acid
  misc_feature (618)..(624): Xaa can be any naturally occurring amino acid
  misc_feature (626)..(629): Xaa can be any naturally occurring amino acid
  misc_feature (631)..(632): Xaa can be any naturally occurring amino acid
  misc_feature (634)..(636): Xaa can be any naturally occurring amino acid
  misc_feature (648)..(648): Xaa can be any naturally occurring amino acid
  misc_feature (650)..(650): Xaa can be any naturally occurring amino acid
  misc_feature (653)..(653): Xaa can be any naturally occurring amino acid
  misc_feature (656)..(656): Xaa can be any naturally occurring amino acid
  misc_feature (659)..(659): Xaa can be any naturally occurring amino acid
  misc_feature (662)..(664): Xaa can be any naturally occurring amino acid
  misc_feature (666)..(667): Xaa can be any naturally occurring amino acid
  misc_feature (669)..(669): Xaa can be any naturally occurring amino acid
  misc_feature (673)..(675): Xaa can be any naturally occurring amino acid
  misc_feature (679)..(680): Xaa can be any naturally occurring amino acid
  misc_feature (684)..(684): Xaa can be any naturally occurring amino acid
  misc_feature (694)..(696): Xaa can be any naturally occurring amino acid
  misc_feature (698)..(706): Xaa can be any naturally occurring amino acid
  misc_feature (708)..(709): Xaa can be any naturally occurring amino acid
  misc_feature (711)..(713): Xaa can be any naturally occurring amino acid
  misc_feature (715)..(718): Xaa can be any naturally occurring amino acid
  misc_feature (720)..(720): Xaa can be any naturally occurring amino acid
  misc_feature (723)..(723): Xaa can be any naturally occurring amino acid
  misc_feature (726)..(726): Xaa can be any naturally occurring amino acid
  misc_feature (728)..(733): Xaa can be any naturally occurring amino acid
  misc_feature (735)..(738): Xaa can be any naturally occurring amino acid
  misc_feature (742)..(742): Xaa can be any naturally occurring amino acid
  misc_feature (745)..(745): Xaa can be any naturally occurring amino acid
  misc_feature (753)..(753): Xaa can be any naturally occurring amino acid
  misc_feature (755)..(756): Xaa can be any naturally occurring amino acid
  misc_feature (778)..(779): Xaa can be any naturally occurring amino acid
  misc_feature (782)..(797): Xaa can be any naturally occurring amino acid
  misc_feature (800)..(812): Xaa can be any naturally occurring amino acid
  misc_feature (816)..(852): Xaa can be any naturally occurring amino acid
  misc_feature (856)..(856): Xaa can be any naturally occurring amino acid
  misc_feature (858)..(858): Xaa can be any naturally occurring amino acid
  misc_feature (861)..(861): Xaa can be any naturally occurring amino acid
  misc_feature (863)..(863): Xaa can be any naturally occurring amino acid
  misc_feature (865)..(868): Xaa can be any naturally occurring amino acid
  misc_feature (871)..(871): Xaa can be any naturally occurring amino acid
  misc_feature (874)..(875): Xaa can be any naturally occurring amino acid
  misc_feature (877)..(877): Xaa can be any naturally occurring amino acid
  misc_feature (886)..(887): Xaa can be any naturally occurring amino acid
  misc_feature (890)..(890): Xaa can be any naturally occurring amino acid
  misc_feature (892)..(897): Xaa can be any naturally occurring amino acid
  misc_feature (899)..(912): Xaa can be any naturally occurring amino acid
  misc_feature (914)..(914): Xaa can be any naturally occurring amino acid
  misc_feature (917)..(917): Xaa can be any naturally occurring amino acid
  misc_feature (920)..(920): Xaa can be any naturally occurring amino acid
  misc_feature (926)..(926): Xaa can be any naturally occurring amino acid
  misc_feature (932)..(932): Xaa can be any naturally occurring amino acid
  misc_feature (941)..(942): Xaa can be any naturally occurring amino acid
  misc_feature (949)..(954): Xaa can be any naturally occurring amino acid
  misc_feature (956)..(957): Xaa can be any naturally occurring amino acid
  misc_feature (959)..(963): Xaa can be any naturally occurring amino acid
MXXXKKKMSLREXREAEKQARXXKXAAASKNXXAVPAKXXAAXXPXXXXXXXXXXXKKSXAKAAGLKSXXVXGXXXYMTSFGXGNXAXLEKKIXXBXXXXXXXXXXXXEXXXXXXXXXXXXXXXXXXXXXXXXXXNPLXXXXXXXXXVXXDMLGLKXXLEKXYFGKXFDDNIHIQLIYNILDIEKILAVYXXNIVYALNNXXXXXXXXXNXDXXGXXSTXXTYDXFXXPXXXXXXXXXXXXXIXXXXXXFXKXXXXXRLGYFGXAFXXXXKBXXXXXXXXKEXYXILALXXXLRQXXXHXXXXXXXXXXXWLYXLXXXLXXEXXXTLDXXXDXXXXXINXXFXXXNKVNXXXLXXXXGXXXXXXXXXXYYDFXXXKXXKNLGFSIKKLREXMLXXXXAXXXXXXZYDSVRXKLYXLXDFXIYXXYXXEXXXXXEXXVXXLRXSXXDXEKXXXYXXEAXXLWXXXXXXXXXXXXXXXXGXXXKXXXKXBXDXXXXXXXXXXXXXXXXBVXXFSKLIYXLTXFLDGKEINDLLTTLINKFDNIXSFLXVMXELGLXXXFXXXYXXFXXSXXIXXELXXXKNXARMXKPXXXAKRXMYRDALXILGIXXXXXXXXIXXXLXXXXXXXDXXXXKXXKXXXGLRNFIANNVIXSXRFXYLXRYXNPXXXRXXAXNEKXXXFVLXXIPDXQIERYYESCXXXBXXXXXXXXXIXXLXXXIXXXXFXBFXBVXQXXXXXXNXXXXKEKXKAXIGLYLTVXYXXVKNLVNVNARYVIAFHCLERDXXLYXXXXXXXXXXXXXXXXLTXXXXXXXXXXXXXYLKXXXXXXXXXXXXXXXXXXXXXXXXXXXXXXXXXXXXXYRNXVXHLXAXRXXXXYIXDIXXVXSYFALYHYXXQRXLXXXXXXKXXXXXXXXXXXXXXHXTYXKDXVKALNXPFGYNXPRYKNLSIXXLFDRNEXXXXXXEXXKXXXXXDSQ

SEQ ID NO: 139 - DNA, 2718 bp, Artificial Sequence
  Gut metagenome P1E0 nCas1 sequence
atggaacgtgaggtcaaaaagccccccaaaaaatccttggcaaaggcggcgggactgaagtccaccttcgtcatttcgccgcaggagaaggagctggccatgaccgccttcgggcggggcaacgacgcgctgctgcaaaagcgcatcgtggacggcgtggtgcgggatgtggccggagagaagcagcagtttcaggtgcagcggcaggacgagagccgtttccgactgcaaaacagccgccttgccgaccgcacggtaacggcggacgacccgctgcaccgcgcggagacgccccgccgccagccgctgggcgcaggtatggatcagctgcgccgcaaggcaatactggagcagaaatacttcggcaggacgtttgacgacaacatccacatccaactgatctacaacatattggacatccacaagatgctggctgtccccgccaaccacatcgtccacacgctgaatctgctgggcggatacggcgagacggactttgtggggatgctgcccgccgggctgccgtatgacaagctgagggtcgtgaaaaaaaagaacggcgacaccgtggacatcaaggcggatatcgccgcctatgccaagcggccgcagctggcctatctgggtgcggcgttctatgacgtgacccccggcaagagcaaaagggacgcggcgcggggcagagtcaagcgcgagcaggacgtgtatgccattctctcgctgatgagccttctgcggcagttctgcgcccacgacagtgtgcggatatggggacagaacaccaccgccgccctgtatcatttgcaggcgctgccgcaggacatgaaggatctgctggatgacggctggcgcagggcgctgggcggcgtcaacgaccatttcctcgacaccaacaaggtgaacctgctgaccctgttcgagtactacggcgccgagacgaagcaggcgcgggtggcgctgacgcaggacttctaccgcttcgtggtgctgaaggagcagaagaacatgggcttctccctgaggcgtctgcgggaggagctgctgaagctgccggacgccgcctacctcaccggtcaggagtacgactcggtgcggcagaagctgtatatgctgctggacttcctgctgtgccgcctctacgcgcaggagcgggccgaccgctgcgaggagctggtgtccgcgctgcgctgcgccttgtcggatgaggaaaaggacaccgtctatcaggcggaggccgccgcgctgtggcaggcgctgggcgacacgctgcgccggaagctgctgccgctgctgaaaggcaaaaagctgcaagacaaggacaagaagaagtcggatgagctggggctgtcccgtgacgtgctggatggtgtgctgttccgccccgcacagcagggcagccgcgccaacgccgactatttctgccggctgatgcacctgtccacatggttcatggacggcaaggagatcaacaccctgctgaccaccctcatcagcaagcttgagaatatcgacagcctgcggagcgtgctggagagcatgggactggcgtacagctttgtaccggcctacgccatgtttgaccacagccgctatatcgccggtcagctgcgggtggtcaacaacatcgcgcggatgcgtaagcctgccatcggcgccaagcgggagatgtaccgcgccgccgtggtgctgctgggcgtggacagcccggaggcagccgcggccatcaccgacgacctgctgcagatcgacccggaaacggggaaggtgcgcccccgcagcgacagcgcacgggacacgggtctgcggaacttcatcgccaacaacgtggtggaatcccgccgcttcacctacctgctgcgctacatgacgccggagcaggcgcgcgtgctggcgcagaacgaaaagctcatcgccttcgtgctgtccaccgtgcccgacacccagctggagcgctactgccgcacctgcgggcgggaggacatcaccggccgtccggcgcagatacgttacctgacggcgcagatcatgggcgtccggtatgagagcttcaccgatgtggagcagcgcgggagaggggataaccccaaaaaggagcggtacaaggctctcatcggcctgtacctgacggtgctgtatctggcggtgaagaatatggtcaactgcaacgcccgctacgtcatcgccttctactgccgtgaccgtgacacagcgctctatcagaaggaggtctgctggtacgatctggaggaggacaagaaaagcggcaagcagcggcaggtggaggactacaccgccctgacccgctattttgtgtcgcagggctatctgaaccgccatgcctgcggctatctgcgaagcaatatgaacggcatcagcaacagcctgctgaccgcctaccgcaacgcggtggatcacctgaacgcgatcccgccgctgggcagcctgtgccgggacatcggccgggtggacagctactttgccctgtaccactacgccgtgcagcagtatctgaacggcagatattacagaaagacgccccgcgagcaggagctgtttgccgccatggcgcagcataggacatggtgcagcgatctggtgaaggcactgaacaccccctttggctacaacctcgcccgctacaagaacctgtccattgacggtctgtttgaccgcgagggcgaccatgtggtgcgggaggacggcgaaaaaccggcggag

SEQ ID NO: 140 - DNA, 2835 bp, Artificial Sequence
  Anaerobic digester nCas1 sequence
aataacaaaagaaaaaccaaagctaaggcagctggactcaaatccgtttttttcgaccaaaagcaagctgttttgacgacttttgcaaaaggcaataattctcaaatcgaaaagaaggtcgtaaatagcgaggttaaggatttgcgacaaccacctgcttttgatctcgaacttaaagagaagactttttatatcagcggtaaaaacaacatcaatacctcaagagaaaacccattggcttccgcgtcgcttcctctaagcaagcgacaacgaattagagcagaaagaattaaacgggcgagagaggagaatcgcccctaccataacgtaaagagagtcggcgaagatgacttacgggcgaaagccgatttagagaagcactatttcggaaaagaatactctgacaatttaaaaattcaaataatctacaacattctcgatataaataagattatttccccctatattaatgatattgtttattctatgaataatcttgctcgtaacgacgagtatattgatggcaagattgatgttatcggcagtttaagctcgacgaccgattactcttcatttatgagtccaaataaggatttagaaaaagaaaaaaaattctcttttcatcgcgaaaactacaaaaaatttgtcgaagcctctaagccatatatgcgatattatggaaaagtttttattcgcgatgtcaaaaagagcaaactcagcaccggcaagggcgagaaaatcgaagtcatgtatcgctctgacgaggaaattttcacaatcttccaaatattaagttatgttcgtcaaagcatcatgcataatgatataggcaataagtcatcgattttagcaatcgaaaaatatcctgcccgctttgttgggttcttatcggacttgcttaaaacaaaaacaaatgatgtcaatagaatgttcatcgataataatagccagactaatttctgggtacttttttctatctttggtcttcaagatcatacgagcggcgcggacaaaatttgtcgtaatttttatgatttcgtcattaaagccgatagcaaaaacttaggtttttcacttaaaaaaatacgggaattaatgctcgatttgccaaatgccaatatgcttagagatcatcaatttgacactgttcgcagcaagttttacacactgcttgatttcatcatttaccagcactatttagaagaaaagtcgcgaatagacaatatggttgagaagttaagaatgactttaaaagaggaagaaaaggaagtgctttatgctgccgaggcaaaaatagtctggaacgccatcggggcgaaagtcataaacaagcttgttccgatgatgaatggcgacgcgctaaaagagattaaaaggaaaaacagagaccgcaaattgcctcaaagcgttatcgcaacggtccaagttaattcagacgctaacgtatttagtggcctgatatacttccttaccctctttttagacggcaaagaaattaatgaaatggtcagcaaccttattaccaaattcgaaaacattgatagtttactccatgttgatcgcgaaatttataaaagcgatgaaaaggatctcgatttagaaattgaaaaactcgcccttttctttaaaggtgtcgtgcgaccgaacgctaaaacggataccggcgccggagaaatatctaaatcattttcgatatttcaatccgccgaaagaattatcgaggagctgaagtttatcaaaaatgtgacgcggatggataatgaaattttcccatcagaaggagtgtttttagatgcggcaaatgtcttgggagttagaggcgacgacttcgatttttcaaacgaatttgtcggtgatgatttgcattctgacgccaataaaaaaattatcaataagatcaacggcaccaaagaagatcgcaatttgcgcaacttcataataaataatgttgtcaagtcgcggcgctttcaatatatcgcccgccacatgaacacacactatgttaaacaactcgccaacaacgaaactctcaaccgctttgtcttaaataaaatgggtgatgctaaaatcattaaccgctactacgaaagcatcagtggaaacactccaaatatcgaggttagaagccagatcgattatttggttaaacgtcttcggagtttcagttttgaagatctcaacgacgtaaaacaaaaagtgaggcccggcacaaatgaaagcatagaaaaggaaaagaaaaaagcgctagtgggtctttgcttaaccattcaatacttggtatataagaatctcgtcaatataaacgctcgttatacgactgctttctattgtcttgaacgggacagcaaacttaaaggctttggagttgatgtttggcgagattttgaaagctatacagccctgacaaatcactttattaaagagggctatcttcctgtccgcaaggcagaaattttacgagcgaatttaaaacatcttgattgcgaagatggatttaaatattatcgcaaccaagtcacacaccttaacgccatccgcgtagcatacaaatatattaacgaaattaaaagtgttcactcatatttcgcgctctatcattatattatgcaacgccacctatatgattctttgcaggcaaaggcaaaagattctagtggttttgttattgacgccttaaaaaagagttttgagcacaagatttactcgaaggatcttttgcacgttcttcattcgcccttcggttacaatacggcccgatacaaaaacttaagtatcgaggcattatttgacaaaaacgaaagccggcccgaggtgaatcctttatcgaccaacgat

SEQ ID NO: 141 - DNA, 2769 bp, Artificial Sequence
  Ruminococcus sp. CAG:57 nCas1 sequence
atggcaaaaaagaataaaatgaagcctagagagctgcgtgaggctcagaaaaaagccagacagctcaaagcggctgagataaataataacgctgctcctgcgatcgctgccatgcctgctgcagaggtcattgcacctgtggcagagaagaaaaaatcctccgtaaaggcggcaggaatgaagtctattcttgtcagcgaaaataaaatgtacataacctctttcggcaagggcaattctgctgtgcttgaatatgaggtggacaataatgactacaacaaaactcagctttcttcaaaggacaacagcaatatcgagcttggtgatgtaaacgaggtaaacatcactttttcaagcaagcatggctttgggagcggagtggagataaatacttcaaaccctactcacagaagcggtgaaagctcgcctgtaagaggggatatgctggggcttaaatcggagcttgaaaagcgctttttcggcaaaacttttgatgataatatacatatccagcttatttacaacattctggatatcgaaaagatacttgcggtgtatgtaacgaatatcgtttatgcgctgaacaatatgcttggtataaaggattctgaaagttatgatgattttatggggtatctttctgcaagaaatacttatgaagtttttactcaccctgacaaaagcaatctttccgataaggtaaagggtaatatcaagaaaagccttagcaagtttaatgacttgctgaaaactaagcgccttggctatttcggccttgaagagccaaagacaaaagacacaagagcttcggaagcatacaaaaagcgtgtttatcatatgcttgcaattgtggggcagataagacagtgtgtttttcatgataaatcgggtgcaaaaagatttgacctttacagttttattaacaatattgatcccgaatacagagatactcttgactatcttgttgaggagcgtttaaagtccataaacaaggactttatcgagggtaacaaggtcaatatcagcctgcttattgatatgatgaaaggctatgaggctgatgatatcatacgcctttattacgatttcattgtgcttaaatctcagaaaaatctcggcttttctatcaaaaagcttcgtgagaaaatgctggaggaatacggtttcagatttaaggacaagcaatatgactctgtgcgctcaaagatgtacaagcttatggatttcctgcttttctgcaactactacagaaatgacgttgccgcaggcgaagctcttgtgcgtaaactgcgtttttcaatgaccgatgatgaaaaagaggggatatatgctgatgaagcggcaaagctttggggcaaattcaggaatgattttgaaaatatcgccgaccacatgaacggtgacgttatcaaggagcttggcaaggctgacatggattttgatgagaaaattcttgacagtgaaaagaagaatgcgtctgaccttttgtatttctccaaaatgatatatatgctcacatattttcttgacggcaaggagataaacgatcttcttacaacgcttatcagcaagtttgataacatcaaggagtttttgaagataatgaaaagctctgctgttgatgttgagtgtgagcttacggcgggctacaagctgttcaatgacagccagaggataaccaacgagctttttatcgtaaagaacattgcttccatgagaaagcctgcggcttcagcgaagcttacgatgttccgtgacgcactgactatactcggtatagacgacaatatcacggacgataggataagcgagattctaaaacttaaagaaaaaggcaagggcatacatggtctgagaaattttataacaaacaatgttatcgagtcctctcggtttgtataccttatcaagtatgcgaacgctcagaagataagagaagtggctaaggatgagaaagttgtcatgtttgttcttgggggtatccctgacacgcagatagagcgttattacaagagttgtgtggagtttcctgacatgaatagttctttggaagcaaagcgcagtgagcttgcgagaatgataaagaacatcagctttgatgatttcaaaaatgtgaaacagcaggcaaagggcagagaaaacgtggctaaggagagggcaaaggctgttatcgggctttatcttacggtcatgtatctgctggtgaaaaatcttgtgaatgtcaatgcaaggtatgttattgcgatacactgccttgaacgtgattttgggctgtataaggagataattcctgagttggcttcaaagaacttgaaaaatgactacaggatactttcacagacgctttgtgaactttgtgatgatcgtaatgagtcgtcgaatttgttcttgaaaaagaacaagcggctgcgcaagtgcgttgaagttgatatcaataatgcagacagcagcatgacaagaaaataccgcaactgtattgctcatcttactgtagttcgtgaactgaaagaatacataggagatattcgtacagtggattcttacttctccatttatcattatgttatgcagcgttgtatcacgaaaaggggagatgacacaaagcaagaagagaaaataaagtatgaggacgatcttttaaaaaatcacggctatacgaaagactttgtaaaggctctcaactcgccgtttggatacaacattccgaggtttaaaaatctttcaattgagcagttgtttgacagaaatgaatatcttactgaaaagtag

SEQ ID NO: 142 - DNA, 2715 bp, Artificial Sequence
  Human codon-optimized Gut metagenome P1E0 nCas1
gaaagggaggtgaagaagcctcccaagaaatccctggccaaagccgccggactgaagtccacattcgtcatcagcccccaggaaaaggaactcgctatgaccgcctttggcagaggcaacgatgccctgctgcaaaagagaatcgtggacggcgtggtccgtgatgttgccggagagaaacagcagttccaggtccagaggcaagacgagagcagattcagactccaaaactccagactggccgataggaccgtcaccgctgacgaccccctccacagggctgaaacacccaggagacagcctctgggcgctggcatggatcagctgaggagaaaagccattctggagcaaaagtactttggcaggacattcgacgacaacatccacatccagctgatctacaacatcctggacatccacaagatgctggctgtgcctgctaaccatatcgtgcacaccctgaacctcctgggaggctacggcgaaactgattttgtgggaatgctgcctgccggactcccctacgataagctcagggtcgtgaagaaaaaaaatggcgataccgtcgacatcaaggccgacattgctgcctatgccaaaagaccccagctggcttacctgggagctgccttctatgacgtgacccctggaaaaagcaagcgtgatgctgccaggggcagggtgaagagggaacaggacgtctatgccattctgtccctcatgtccctgctgagacaattctgcgcccacgatagcgtcaggatctggggccagaataccaccgccgccctgtaccacctccaggccctgccccaggatatgaaggacctgctggacgacggctggaggagagctctgggaggcgtgaatgaccatttcctcgacaccaacaaggtgaacctcctcaccctcttcgagtactatggcgccgaaaccaagcaggctagggtggccctgacacaggacttttacaggttcgtggtgctgaaggagcagaagaacatgggctttagcctcaggaggctgagggaagagctgctgaagctgcccgacgccgcttacctgaccggacaggagtacgactccgtgaggcagaaactgtacatgctcctggacttcctgctgtgcaggctgtacgcccaggagagagccgatagatgcgaagagctggtgagcgccctcagatgtgctctgagcgacgaggagaaggatacagtctaccaagctgaagccgctgccctgtggcaagccctgggcgacacactcaggaggaaactcctccccctcctgaagggcaagaaactgcaagacaaggataagaaaaagtccgacgaactcggcctgtccagggatgtgctcgatggcgtgctctttagacctgcccagcagggcagcagagccaacgccgactacttttgtaggctcatgcacctgagcacctggtttatggacggcaaggagatcaataccctgctgaccaccctgatctccaagctggagaatatcgatagcctgaggtccgtcctggagtccatgggcctggcctatagctttgtccctgcctacgccatgtttgaccacagcagatacatcgctggccagctgagggtggtgaacaacatcgccagaatgaggaaacccgccattggagccaaaagagagatgtacagggccgctgtcgtgctgctcggagtggacagccccgaagctgctgccgccattacagacgatctgctgcagatcgatcccgaaactggaaaggttcgtcctagatccgactccgctagagacaccggactgaggaacttcatcgctaacaacgtcgtggagagcaggaggttcacctacctcctgagatacatgacccctgaacaggccagggtcctggctcaaaacgagaagctgattgccttcgtgctcagcacagtgcccgacacccagctggagaggtattgtaggacctgtggaagggaggacatcacaggcaggcccgcccagattaggtatctgaccgctcagatcatgggcgtgaggtacgaaagctttaccgacgtggaacagaggggaaggggcgataatcctaaaaaggagagatacaaggccctgatcggcctctacctgacagtgctgtatctggccgtcaaaaatatggtgaattgtaacgccaggtacgtgatcgccttctactgcagggatagggacaccgccctctaccagaaggaagtgtgttggtatgacctggaggaggacaagaagtccggaaagcaaagacaggtcgaggactatacagccctgaccagatatttcgtgtcccagggctacctgaacagacacgcctgcggctatctcaggtccaacatgaacggcatcagcaacagcctgctgaccgcctacagaaatgccgtggaccacctgaacgccattcctcctctgggctccctgtgtagggacatcggcagagtggattcctacttcgctctgtaccactacgccgtgcaacagtacctcaatggaaggtattacagaaaaacacccagagaacaggaactcttcgccgccatggctcagcacaggacctggtgttccgatctcgtgaaggccctgaacacccctttcggatacaacctggccaggtacaagaacctctccatcgacggactgttcgacagggagggcgatcatgtggtgagagaggatggcgaaaaacctgccgaa

SEQ ID NO: 143 - DNA, 2835 bp, Artificial Sequence
  Human codon-optimized Anaerobic Digester nCas1
aacaacaagagaaaaacaaaggctaaagccgccggcctgaagagcgtttttttcgatcagaagcaggccgtcctgaccacattcgctaaaggcaacaacagccagatcgagaagaaggtggtcaatagcgaagtgaaggacctgagacagccccctgcctttgacctcgaactgaaagaaaaaactttttacatcagcggaaagaataatatcaacaccagcagagagaaccctctggccagcgccagcctgcctctgtccaaaaggcagaggattagggctgagaggatcaagagggccagagaggagaacaggccctaccacaacgtcaaaagggtcggcgaggatgatctgagggccaaagccgacctggagaagcattattttggaaaggaatacagcgataatctcaagatccagatcatttataacattctggacatcaataagatcatcagcccctacatcaatgacatcgtgtactccatgaacaatctggccaggaatgatgagtatatcgacggcaagatcgatgtgatcggttctctgtcctccaccacagactatagcagcttcatgagccccaataaggatctggaaaaggagaagaaattcagctttcacagagaaaactataaaaaatttgtcgaggcctccaagccctacatgagatattacggcaaagtctttatcagggacgtgaaaaaatccaagctgtccaccggcaagggcgaaaagatcgaggtgatgtacaggagcgatgaagagattttcaccatcttccaaatcctgtcctacgtgaggcagagcatcatgcataatgacattggcaacaagagcagcatcctcgccatcgaaaaataccccgccagattcgtgggcttcctgtccgacctcttaaaaactaagaccaacgacgtgaacaggatgttcatcgataacaatagccagacaaatttctgggtcctgttctccatcttcggcctccaggaccatacaagcggcgctgataagatctgcaggaacttctatgatttcgtgatcaaggccgacagcaagaacctgggattctccctgaaaaagatcagggagctcatgctggacctccctaacgctaacatgctcagggatcaccagttcgacacagtgaggagcaagttctataccctcctcgactttatcatttaccagcattacctggaagagaagagcaggatcgacaacatggtcgagaagctcaggatgaccctgaaagaagaggagaaggaggtgctctacgctgccgaagccaagatcgtgtggaatgccattggcgccaaggtcatcaacaagctggtgcctatgatgaacggtgatgctctgaaggagattaaaagaaagaacagggataggaagctgccccagtccgtgatcgctaccgtccaggtgaatagcgatgccaatgtgttttccggcctcatctacttcctcaccctcttcctggacggcaaagagattaacgagatggtgagcaatctcatcaccaagttcgagaatatcgactccctgctgcatgtggatagggagatctataagtccgacgagaaggacctcgacctcgaaatcgagaaactggctctgtttttcaaaggcgtggtcaggcccaacgccaaaacagacacaggagctggcgaaatcagcaagagcttcagcattttccagagcgccgagaggatcatcgaggagctgaaatttatcaagaatgtgacaaggatggacaacgagatctttcccagcgagggagtgttcctggatgctgccaatgtgctgggcgtgagaggagatgacttcgacttttccaacgagttcgtcggcgatgacctccactccgatgccaataaaaagatcatcaacaaaatcaatggcaccaaggaggacaggaacctcagaaacttcattattaataatgtggtgaagagcaggaggttccaatacatcgccaggcacatgaatacccactatgtgaagcagctggccaacaacgagacactgaacaggttcgtgctcaacaaaatgggcgacgccaagattatcaacaggtactatgagtccatcagcggcaacacccccaatatcgaggtcagatcccagattgactacctcgtcaaaagactcaggagcttctccttcgaggacctcaatgacgtgaagcaaaaagtcagacccggcaccaacgaatccatcgagaaggaaaagaaaaaggctctcgtcggactctgcctgacaatccaatatctggtgtacaaaaacctggtcaacatcaacgctaggtacaccacagccttctactgcctggaaagggattccaagctgaagggctttggcgtggatgtgtggagggatttcgagagctacaccgctctgaccaaccacttcatcaaggaaggctatctccccgtcaggaaggccgagattctgagagccaatctgaagcatctggactgcgaggacggcttcaagtattacagaaaccaggtcacccatctgaacgccatcagagtggcttataagtatattaacgaaattaagtccgtgcacagctactttgccctgtaccactacatcatgcagaggcacctctatgactccctccaagccaaagccaaggatagctccggcttcgtcattgacgccctgaagaagtccttcgaacataaaatctacagcaaagacctcctgcacgtgctccattcccctttcggctacaacaccgccaggtacaagaacctgagcatcgaggctctgttcgacaagaatgagagcaggcctgaagtcaaccccctctccaccaacgac

SEQ ID NO: 144 - DNA, 2898 bp, Artificial Sequence
  Human codon-optimized Ruminococcus flavefaciens XPD nCas1
atcgaaaaaaaaaagtccttcgccaagggcatgggcgtgaagtccacactcgtgtccggctccaaagtgtacatgacaaccttcgccgaaggcagcgacgccaggctggaaaagatcgtggagggcgacagcatcaggagcgtgaatgagggcgaggccttcagcgctgaaatggccgataaaaacgccggctataagatcggcaacgccaaattcagccatcctaagggctacgccgtggtggctaacaaccctctgtatacaggacccgtccagcaggatatgctcggcctgaaggaaactctggaaaagaggtacttcggcgagagcgctgatggcaatgacaatatttgtatccaggtgatccataacatcctggacattgaaaaaatcctcgccgaatacattaccaacgccgcctacgccgtcaacaatatctccggcctggataaggacattattggattcggcaagttctccacagtgtatacctacgacgaattcaaagaccccgagcaccatagggccgctttcaacaataacgataagctcatcaacgccatcaaggcccagtatgacgagttcgacaacttcctcgataaccccagactcggctatttcggccaggcctttttcagcaaggagggcagaaattacatcatcaattacggcaacgaatgctatgacattctggccctcctgagcggactgaggcactgggtggtccataacaacgaagaagagtccaggatctccaggacctggctctacaacctcgataagaacctcgacaacgaatacatctccaccctcaactacctctacgacaggatcaccaatgagctgaccaactccttctccaagaactccgccgccaacgtgaactatattgccgaaactctgggaatcaaccctgccgaattcgccgaacaatatttcagattcagcattatgaaagagcagaaaaacctcggattcaatatcaccaagctcagggaagtgatgctggacaggaaggatatgtccgagatcaggaaaaatcataaggtgttcgactccatcaggaccaaggtctacaccatgatggactttgtgatttataggtattacatcgaagaggatgccaaggtggctgccgccaataagtccctccccgataatgagaagtccctgagcgagaaggatatctttgtgattaacctgaggggctccttcaacgacgaccagaaggatgccctctactacgatgaagctaatagaatttggagaaagctcgaaaatatcatgcacaacatcaaggaatttaggggaaacaagacaagagagtataagaagaaggacgcccctagactgcccagaatcctgcccgctggccgtgatgtttccgccttcagcaaactcatgtatgccctgaccatgttcctggatggcaaggagatcaacgacctcctgaccaccctgattaataaattcgataacatccagagcttcctgaaggtgatgcctctcatcggagtcaacgctaagttcgtggaggaatacgcctttttcaaagactccgccaagatcgccgatgagctgaggctgatcaagtccttcgctagaatgggagaacctattgccgatgccaggagggccatgtatatcgacgccatccgtattttaggaaccaacctgtcctatgatgagctcaaggccctcgccgacaccttttccctggacgagaacggaaacaagctcaagaaaggcaagcacggcatgagaaatttcattattaataacgtgatcagcaataaaaggttccactacctgatcagatacggtgatcctgcccacctccatgagatcgccaaaaacgaggccgtggtgaagttcgtgctcggcaggatcgctgacatccagaaaaaacagggccagaacggcaagaaccagatcgacaggtactacgaaacttgtatcggaaaggataagggcaagagcgtgagcgaaaaggtggacgctctcacaaagatcatcaccggaatgaactacgaccaattcgacaagaaaaggagcgtcattgaggacaccggcagggaaaacgccgagagggagaagtttaaaaagatcatcagcctgtacctcaccgtgatctaccacatcctcaagaatattgtcaatatcaacgccaggtacgtcatcggattccattgcgtcgagcgtgatgctcaactgtacaaggagaaaggctacgacatcaatctcaagaaactggaagagaagggattcagctccgtcaccaagctctgcgctggcattgatgaaactgcccccgataagagaaaggacgtggaaaaggagatggctgaaagagccaaggagagcattgacagcctcgagagcgccaaccccaagctgtatgccaattacatcaaatacagcgacgagaagaaagccgaggagttcaccaggcagattaacagggagaaggccaaaaccgccctgaacgcctacctgaggaacaccaagtggaatgtgatcatcagggaggacctcctgagaattgacaacaagacatgtaccctgttcagaaacaaggccgtccacctggaagtggccaggtatgtccacgcctatatcaacgacattgccgaggtcaattcctacttccaactgtaccattacatcatgcagagaattatcatgaatgagaggtacgagaaaagcagcggaaaggtgtccgagtacttcgacgctgtgaatgacgagaagaagtacaacgataggctcctgaaactgctgtgtgtgcctttcggctactgtatccccaggtttaagaacctgagcatcgaggccctgttcgataggaacgaggccgccaagttcgacaaggagaaaaagaaggtgtccggcaattcc

SEQ ID NO: 145 - DNA, 2829 bp, Artificial Sequence
  Human codon-optimized Ruminococcus albus nCas1
gccaagaagtccaagggaatgtccctcagggagaagagggagctggagaagcaaaagaggattcagaaggccgccgtgaatagcgtgaacgatacccctgaaaaaactgaggaggctaatgtggtcagcgtgaacgtgagaaccagcgccgagaacaagcactccaaaaagagcgctgccaaagccctgggcctgaaaagcggcctcgtgattggagatgagctctacctgaccagcttcggaaggggcaacgaagccaagctggagaagaagattagcggcgacaccgtggagaaactgggaattggcgcctttgaggtcgccgaacgtgatgaaagcacactcacactcgagagcggcaggatcaaagacaaaaccgccaggcctaaggaccccagacatattaccgtggacacccagggaaagtttaaggaggacatgctgggcatcaggtccgtgctcgaaaagaagatctttggaaaaaccttcgacgataacatccacgtccagctggcctacaacatcctggacgtcgagaagatcatggctcagtatgtgagcgacatcgtctacatgctgcacaacaccgacaagaccgagaggaacgataacctgatgggatacatgtccattagaaatacctacaaaaccttctgcgacacatccaatctgcccgacgacacaaagcagaaggtggagaatcagaaaagggaattcgacaagatcattaagagcggcagactgggctacttcggcgaagctttcatggtcaacagcggcaactccaccaagctgaggcccgagaaagagatttatcatatcttcgccctcatggccagcctgaggcagagctacttccacggatacgtcaaggataccgactatcagggcacaacatgggcctacacactggaggataagctgaagggccccagccatgaatttagggagacaatcgacaagatctttgacgagggattcagcaagatctccaaggacttcggaaaaatgaacaaagtgaatctccaaatcctggagcagatgatcggcgagctgtacggaagcatcgaaaggcagaacctgacctgcgattactacgattttattcaactcaagaagcacaagtatctcggctttagcatcaagaggctgagagagacaatgctcgagacaacccctgccgagtgttataaggctgagtgctacaatagcgagaggcaaaagctctacaagctgatcgacttcctcatctacgacctctactataacaggaagcccgccagaatcgaagagatcgtcgacaagctgagagagagcgtcaacgacgaggagaaggagagcatctatagcgtggaggccaagtacgtgtatgagtccctgagcaaggtgctggataagagcctgaagaattccgtgtccggcgaaactatcaaggatctgcagaagaggtacgacgacgaaactgccaacagaatttgggacatctcccagcactccatttccggcaatgtcaactgcttctgcaagctgatctacattatgaccctcatgctggatggaaaggagatcaacgacctcctcaccaccctggtgaacaagtttgacaatattgcttcctttattgacgtgatggacgaactcggcctggaacacagctttacagacaactacaagatgtttgccgacagcaaggccatctgcctggacctgcaattcatcaatagctttgctagaatgagcaagatcgacgacgagaaaagcaagagacagctgttcagggatgctctggtgatcctcgatatcggaaacaaggacgaaacttggattaacaactacctcgactccgacatcttcaagctggacaaggaaggcaacaagctgaagggagccaggcatgactttaggaattttatcgccaataatgtcattaagtcctccagattcaagtacctcgtcaaatacagctccgccgacggcatgattaagttaaaaactaacgaaaagctgattggcttcgtgctcgacaagctccccgaaactcaaatcgataggtactacgaatcctgcggcctcgacaatgccgtcgtggacaagaaggtgaggatcgagaaactgtccggactcatcagggacatgaagttcgacgatttttccggcgtcaagacctccaataaggccggcgacaacgataagcaggacaaggccaagtaccaggccattatctccctgtacctgatggtgctctaccagattgtgaagaatatgatctacgtcaacagcaggtatgtgattgccttccactgcctggagagggacttcggaatgtacggcaaggatttcggcaagtactaccagggctgtaggaagctcaccgatcatttcatcgaggagaaatacatgaaggagggcaagctgggctgtaacaagaaagtcggcaggtacctgaagaataacatcagctgttgcaccgacggcctgattaacacctacaggaaccaggtcgatcatttcgccgtcgtcagaaaaatcggaaattacgccgcctacatcaaatccattggcagctggttcgagctctatcattacgtgattcagaggatcgtttttgacgaatatagattcgccctcaacaacaccgagtccaactataagaacagcatcattaagcaccatacatactgcaaggacatggtgaaggccctgaatacccctttcggctacgacctgcccagatataaaaacctgagcattggtgatttattcgacaggaacaactatctgaacaaaacaaaggagtccatcgatgccaactccagcattgatagccag

SEQ ID NO: 146 - DNA, 330 bp, Artificial Sequence
  Ruminococcus sp. CAG:57 CRISPR array
ctactacactggtgcgaatttgcactagtctaaaacaagctttttcttcattgtctacaaatgcaactactacactagtgcgaatttgcactagtctaaaactctatgtagcttttcttgtaaaacatatttctactacactggtgcgattttgcactagtctaaaactcatctgccttctgcatatcggacacttgactactacaccggtgcgaatttgcactagtctaaaacttacacctccttatgcgattttatcgtgcgctactacactggtgcgaatttgcactagtctaaaacttcatcttcaagaccgagcagggacatcat

SEQ ID NO: 147 - protein, 939 aa, Artificial Sequence
  Metagenomic hit contig emb OBVH01003037.1, human gut metagenome sequence
MAKKKRITAKERKQNHRELLMKKADSNAEKEKAKKPVVENKPDTAISKDNTPKPNKEIKKSKAKLAGVKWVIKANDDVAYISSFGKGNNSVLEKRIMGDVSSNVNKDSHMYVNPKYTKKNYEIKNGFSSGSSLVTYPNKPDKNSGMDALCLKPYFEKDFFGHIFTDNMHIQAIYNIFDIEKILAKHITNIIYTVNSFDRNYNQSGNDTIGFGLNYRVPYSEYGGGKDSNGEPKNQSKWEKRDNFIKFYNESKPHLGYYENIFYDHGEPISEEKFYNYLNILNFIRNNTFHYKDDDIELYSENYSEEFVFINCLNKFVKNKFKNVNKNFISNEKNNLYIILNAYGKDTENVEVVKKYSKELYKLSVLKTNKNLGVNVKKLRESAIEYGYCPLPYDKEKEVAKLSSVKHKLYKTYDFVITHYLNSNDKLLLEIVETLRLSKNDDEKENVYKKYAEKLFKADDVINPIKAISKLFARKGNKLFKEKIIIKKEYIEDVSIDKNIYDFTKVIFFMTCFLDGKEINDLLTNIISKLQVIEDHNNVIKFISNNKDAVYKDYSDKYAIFRNAGKIATELEAIKSIARMENKIENAPQEPLLKDALLSLGVSDDTKVLENTYNKYFDSKEKTDKQSQKVSTFLMNNVINNNRFKYVIKYINPADINGLAKNRYLVKFVLSKIPEEQIDSYYKLFSNEEEPGCEEKIKLLTKKISKLNFQTLFENNKIPNVEKEKKKAIITLYFTIVYILVKNLVNINGLYTLALYFVERDGYFYKDICGKKDKKKSYNDVDYLLLPEIFSGSKYREETKNLKLPKEKDRDIMKKYLPNDKDREKYNKFFTAYRNNIVHLNIIAKLSELTKNIDKDINSYFDIYHYCTQRVMFNYCKEKNDVVLAKMKDLAHIKSDCNEFSSKHTYPFSSAVLRFMNLPFAYNVPRFKNLSYKKFFDKQ

SEQ ID NO: 148 - DNA, 36 bp, Artificial Sequence
  Direct repeat sequence
gattgaaaggattgtaaatttgcaaggtcttaaaac

SEQ ID NO: 149 - protein, 958 aa, Artificial Sequence
  Metagenomic hit contig tpg DBYI01000091.1 (Uncultivated Ruminococcus flavefaciens UBA1190 assembled from bovine gut metagenome)
MKKKIKARDLREAKKQEKLAAFSAKANTVYENEDKNVEAFPEALNLRSIKKSMNKAAGLKSTLIDGKSLYLTAFGKGNNAVVEHMIATDDSYSLKTLENEPSLKVKAADELKVTFMSRRPFVQESELSAVNPLHSGKDKPNKSAGQDMLGLKSELEKRYFGKIFDDNLHIQIIHNILDIEKIIAVYATNITAAIDHMVDDDNEQYLQGDFIGYMNTLNTYEVFMEPSKNPRLDSNARKNIENSREKFEYLLDTQRLGYLSLEYDKRSKDKRKSEEIKKRLYHLVAFAGQLRQWSFHSVEGLPRTWIYQLDNPKLAQEYRDTLDYFFNERFDAINKDFIETNNINLHILKEVFPAEDFQKLAALYYDFIVKKTFKNIGFSIKNLREQMLECDEAEKIRSKDMNSVRSKLYKLFDFCIFYQYFIDEERSRENVNYLRSTLNDEQKDAFYEEEGKRLWSENRKKFIYFCDNINKWVKNDYSDEVAKCIDLNEFRVNSNVSYFSKLLYAMSFFLDGKEINDLLTTLINKFDNIRSFIDTANFLNIDVKFTKDYDFFNIICDYAGELNIIKNIARMKKPSPSAKKNMYRDALTILGIPTEMSDEQLDAEIDKILEKKINPVTGKTEKGKNPFRNFIANNVIENKRFIYVIKFCNPKNVRKLVNNTKVTEFVLKRMPETQIDRYFESCIEGNLNPTTEKKIEKLAEMIKNIKFEEFRNVKQKVRDNSQEAVEKERFKAIIGLYLTVIYLLVKNLVNVNSRYVMAFHCLERDAKLYGVQNIGGDYLALTAKLCAEGDDYGKKLSEAKQNINQDKVQMPKNYFLARNKRWREAIEQDIDNAKKWFIGEKFNNVKNYRNNVAHLTAIRNCAEFIGEITKIDSYFALYHYLIQRQLAGRLDPNHPGFEKNYPQYAPLFKWNTYVKDMVKALNSPFGYNIPRFKDLSIDALFDRNEMKEETDDEKKIQT

SEQ ID NO: 150 - DNA, 36 bp, Artificial Sequence
  Direct repeat 1
gaactatacccctaccaaatggtcggggtctgaaac

SEQ ID NO: 151 - DNA, 37 bp, Artificial Sequence
  Direct repeat 2
tgaactacacccctgccaagtggttggggtctgaaac

SEQ ID NO: 152 - DNA, 36 bp, Artificial Sequence
  Direct repeat 3
gaactacacccctaccaagtggttggggtctgaaac

SEQ ID NO: 153 - protein, 877 aa, Artificial Sequence
  Metagenomic hit contig tpg DJXD01000002.1 (uncultivated Ruminococcus assembly, UBA7013, from sheep gut metagenome)
MKKQKSKKTVSKTSGLKEALSVQGTVIMTSFGKGNMANLSYKIPSSQKPQNLNSSAGLKNVEVSGKKIKFQGRHPKIATTDNPLFKPQPGMDLLCLKDKLEMHYFGKTFDDNIHIQLIYQILDIEKILAVHVNNIVFTLDNVLHPQKEELTEDFIGAGGWRINLDYQTLRGQTNKYDRFKNYIKRKELLYFGEAFYHENERRYEEDIFAILTLLSALRQFCFHSDLSSDESDHVNSFWLYQLEDQLSDEFKETLSILWEEVTERIDSEFLKTNTVNLHILCHVFPKESKETIVRAYYEFLIKKSFKNMGFSIKKLREIMLEQSDLKSFKEDKYNSVRAKLYKLFDFIITYYYDHHAFEKEALVSSLRSSLTEENKEEIYIKTARTLASALGADFKKAAADVNAKNIRDYQKKANDYRISFEDIKIGNTGIGYFSELIYMLTLLLDGKEINDLLTTLINKFDNIISFIDILKKLNLEFKFKPEYADFFNMTNCRYTLEELRVINSIARMQKPSADARKIMYRDALRILGMDNRPDEEIDRELERTMPVGADGKFIKGKQGFRNFIASNVIESSRFHYLVRYNNPHKTRTLVKNPNVVKFVLEGIPETQIKRYFDVCKGQEIPPTSDKSAQIDVLARIISSVDYKIFEDVPQSAKINKDDPSRNFSDALKKQRYQAIVSLYLTVMYLITKNLVYVNSRYVIAFHCLERDAFLHGVTLPKMNKKIVYSQLTTHLLTDKNYTTYGHLKNQKGHRKWYVLVKNNLQNSDITAVSSFRNIVAHISVVRNSNEYISGIGELHSYFELYHYLVQSMIAKNNWYDTSHQPKTAEYLNNLKKHHTYCKDFVKAYCIPFGYVVPRYKNLTINELFDRNNPNPEPKEEV

SEQ ID NO: 154 - DNA, 36 bp, Artificial Sequence
  Direct repeat
caactacaaccccgtaaaaatacggggttctgaaac

SEQ ID NO: 155 - protein, 984 aa, Artificial Sequence
  Metagenomic hit contig OGZC01000639.1 (human gut metagenome assembly)
MKKKNIRATREALKAQKIKKSQENEALKKQKLAEEAAQKRREELEKKNLAQWEETSAEGRRSRVKAVGVKSVFVVGDDLYLATFGNGNETVLEKKITPDGKITTFPEEETFTAKLKFAQTEPTVATSIGISNGRIVLPEISVDNPLHTTMQKNTIKRSAGEDILQLKDVLENRYFDRSFNDDLHIRLIYNILDIEKILAEYTTNAVFAIDNVSGCSDDFLSNFSTRNQWDEFQNPEQHREHFGNKDNVICSVKKQQDLFFNFFKNNRIGYFGKAFFHAESERKIVKKTEKEVYHILTLIGSLRQWITHSTEGGISRLWLYQLEDALSREYQETMNNCYNSTIYGLQKDFEKTNAPNLNFLAEILGKNASELAEPYFRFIITKEYKNLGFSIKTLREMLLDQPDLQEIRENHNVYDSIRSKLYKMIDFVLVYAYSNERKSKADALASNLRSAITEDAKKRIYQNEADQLWTSYQELFKRIRGFKGAQVKEYSSKNMPIPIQKQIQNILKPAEQVTYFTKLMYLLTMFLDGKEINDLLTTLINKFDNISSLLKTMEQLELQTTFKEDYTFFQQSSRLCKEITQLKSFARMGNPISNLKEVMMVDAIQILGTEKSEQELQSMACFFFRDKNGKKLNTGEHGMRNFIGNNVISNTRFQYLIRYGNPQKLHTLSQNETVVRFVLSRIAKNQRVQGMNGKNQIDRYYETCGGTNSWSVSEEEKINFLCKILTNMSYDQFQDVKQSGAEITAEEKRKKERYKAIISLYLTVLYQLIKNLVNINARYIIAFHCLERDAILYSSKFNTSINLKKRYTALTEMILGYETDEKARRKDTRTVYEKAEAAKNRHLKNVKWNCKTRENLENADKNAIVAFRNIVAHLWIIRDADRFITGMGAMKRYFDCYHYLLQRELGYILEKSNQGSEYTKKSLEKVQQYHSYCKDFLHMLCLPFAYCIPRYKNLSIAELFDRHEPEAEPKEEASSVNNSQFITT

SEQ ID NO: 156 - DNA, 33 bp, Artificial Sequence
  Direct repeat 1
actacaatccatggttatcgtggatactaaaac

SEQ ID NO: 157 - DNA, 33 bp, Artificial Sequence
  Direct repeat 2
actacaatccacgtttatcgtggatactaaaac

SEQ ID NO: 158 - protein, 978 aa, Artificial Sequence
  Metagenomic hit contig emb OHBM01000764.1 (human gut metagenome assembly)
  misc_feature (1)..(222): Xaa can be any naturally occurring amino acid
XXXXXXXXXXXXXXXXXXXXXXXXXXXXXXXXXXXXXXXXXXXXXXXXXXXXXXXXXXXXXXXXXXXXXXXXXXXXXXXXXXXXXXXXXXXXXXXXXXXXXXXXXXXXXXXXXXXXXXXXXXXXXXXXXXXXXXXXXXXXXXXXXXXXXXXXXXXXXXXXXXXXXXXXXXXXXXXXXXXXXXXXXXXXXXXXXXXXXXXXXXXXXXXXXXXXXXXXXXXXXXHPLQKRYRYLTSTNLKSFETYKNNLVNKKKFDLDRVKKIPQLAYFGSAFYNTPEDTSAKITKTKIKSNEEIYYTFMLLSTARNFSAHYLDRNRAKSSDAEDFDGTSVIMYNLDNEELYKKLYNKKVHMALTGMKKVLDANFNKKVEHLNNSFIKNSAKDFVILCEVLGIKSRDEKTKFVKDYYDFVVRKNYKHLGFSVKELRELLFANHDSNKYIKEFDKISNKKFDSVRSRLNRLADYIIYDYYNKNNAKVSDLVKYLRAAADDEQKKKIYLNESINLVKSGILERIKKILPKLNGKIIGNMQPDSTITASMLHNTGKDWHPISENAHYFTKWIYTLTLFMDGKEINDLVTTLINKFDNIASFIEVLKSQSVCTHFSEERKMFIDSAEICSELSAMNSFARMEAPGASSKRAMFVEAARILGDNRSKEELEEYFDTLFDKSASKKEKGFRNFIRNNVVDSNRFKYLTRYTDTSSVKAFSNNKALVKFAIKDIPQEQILRYYNSCFGASERYYNDGMSDKLVEAIGKINLMQFNGVIQQADRNMLPEEKKKANAQKEKYKSIIRLYLTVCYLFFKNLVYVNSRYYSAFYNLEKDRSLFEINGELKPTGKFDEGHYTGLVKLFIDNGWINPRASAYLTVNLANSDETAIRTFRNTAEHLEALRNADKYLNDLKQFDSYFEIYHYITQRNIKEKCEMLKEQTVKYNNDLLKYHGYSKDFVKALCVPFGYNLPRFKNLSIDALFDKNDKREKLKKGFED

SEQ ID NO: 159 - DNA, 36 bp, Artificial Sequence
  Direct repeat
gaactacagccctccttaaatggggggttctaaaac

SEQ ID NO: 160 - protein, 1023 aa, Artificial Sequence
  Metagenomic hit contig emb OHCP01000044.1 (human gut metagenome assembly)
MAKKITAKQKREEKERLNKQKWAKNDSVIIVPETKEEIKTGEIQDNNRKRSRQKSQAKAMGLKAVLSFDNKIAIASFVSSKNAKSSHIERITDKEGTTISVNSKMFESSVNKRDINIEKRITIEEPQQDGTIKKEEKGVKSTTCNPYFKVGGKDYIGIKEIAEEHFFGRAFPNENLRVQIAYNIFDVQKILGTFVNNIIYSFYNLSRDEVQSDNDVIGMLYSISDYDRQKETETFLQAKSLLKQTEAYYAYFDDVFKKNKKPDKNKEGDNSKQYQENLRHNFNILRVLSFLRQICMHAEVHVSDDEGCTRTQNYTDSLEALFNISKAFGKKMPELKTLIDNIYSKGINAINDEFVKNGKNNLYILSKVYPNEKREVLLREYYNFVVCKEGSNIGISTRKLKETMIAQNMPSLKEENTYRNKLYTVMNFILVRELKNCATIREQMIKELRANMDEEEGRDRIYSKYAKEIYLYVKDKLKLMLNVFKEEAEGIIIPGKEDPVKFSHGKLDKKEIESFCLTTKNTEDITKVIYFLCKFLDGKEINELCCAMMNKLDGISDLIETAKQCGEDVEFVDQFKCLSKCATMSNQIRIVKNISRMKKEMTIDNDTIFLDALELLGRKIEKYQKDKNGDYVKDEKGKKVYTKDYNNFQDMFFEGKNHRVRNFVSNNVIKSKWFSYVVRYNKPAECQALMRNSKLVKFALDELPDSQIEKYYISVFGEKSSSSNEEMRRELLKKLCDFSVRGFLDEIVLLSEDEMKQKDKFSEKEKKKSLIRLYLTIVYLITKSMVKINTRFSIACATYERDYILLCQSEKAERAWEKGATAFALTRKFLNHDKPTFEQYYTREREISAMPQEKRKELRKENDQLLKKTHYSKHAYCYIVDNVNNLTGAVANDNGRGLPCLSEKNDNANLFLEMRNKIVHLNVVHDMVKYINEIKNITSYYAFFCYVLQRMIIGNNSNEQNKFKAKYSKTLQEFGTYSKDLMWVLNLPFAYNLPRYKNLSNEQLFYDEEERMEKIVGRKNDSR

SEQ ID NO: 161 - DNA, 36 bp, Artificial Sequence
  Direct repeat
gtactaaagcccgctagtatagacgggttctaagac

SEQ ID NO: 162 - protein, 926 aa, Artificial Sequence
  Metagenomic hit contig emb OGDF01008514.1 (human gut metagenome assembly)
MTETKPKREDIAKTPAAKSRSKAAGLKSTFAVNGSVLLTSFGRGNDAVPEKLITEKAVSEINTVKPRFSVEKPATSYSSSFGIKSHISATADNPLAGRAPVGEDAIHAKEVLEQRVFGKTFSDDNIHIQLIYNILDIRKILSTYANNVVFTINSMRRLDEYDREQDYLGYLYTGNSYERLLDIADKYAVDGEDWRNTAAGISNDFEKKQFQTINGFWDLLDMIEPYMCYFSEAFFCETTVKDPDSGRIVPCLEQRSDGDIYNILRILSIVRQTCMHDNASMRTVMFTLGQNSVRDRKNGFDELAELLDYLYDEKIDIVNRDFLRNQKNNIELLSRIYGSSADSPERDRLVQNFYDFRVLSQDKNLGFSIKKLREKLLDSPALSVVRSKKYDTMRSKIYSLIDFMIYRKFSENHVAVDDFVEELRSLLTEDEKESAYSRWAETLINDGFAQEILVKLLPQTDPAVIGKIKGKKLLNDSIAGIKLKKDASFFTKIINVLCMFQDGKEINELVSSLVNKFANIQSFVDVMRSQGIDSGFTADYAMFAESGRISRELHILKGIARMQHSIAGLGDVKIYGSDDKFHGVSRRVYTDAAYILGFGERSEDNDGYVDDYVSSKLLGGADKNLRNFITNNVIKNRRFLYTVRYMNPKRAKKLVQNDALVVLALSGIPETQIDRYYKSCIEKRSFNPDLNEKIAALSEMITTLKIDDFEDVKQNPEKNANYEAKKNQRISKERYKACIGLYLTVLYLICKNLVKINARYSIAIGCLERDTQLHGVDFKGAAYMTRDVFIAKGWINPKKPTVKSIKEQYAFLTPYIFTTYRNMIAHLAAVTNAYKYIPQMDRFKSWFHLYHTVIQHSLIQQYEYDRDYGRKGAPVVSERVLQLLEQCREHSNYSRDLLHILNLPFGYNLPRYLNLSSEKYFDANAI

SEQ ID NO: 163 - DNA, 36 bp, Artificial Sequence
  Direct repeat
ctactacactggtgcgaatttgcactagtctaaaac

SEQ ID NO: 164 - protein, 1030 aa, Artificial Sequence
  Metagenomic hit contig emb OGPN01002610.1 (human gut metagenome assembly)
MAKKITAKQKREEKERLNKQKWAKQDTPVVPKSKTEEKPVAASDDKLLKTTQVKKVQTKSKAKAMGLKTVLSFDDKIAIASFVNDKKTKLPHIERITDKSGTTIHENARMFDSSVDEQNVNIEKRMTIEEKQNDGTFKKDEKDVKATICNPYFKTCGKDYIGIKDVAEKYFFGKTFPNENLRVQIAYNVFDIQKILGTYVNNIIYSFYNLRRDGKSDVDIIGSLYAFADFDNQLKDKPAFREAKDLLKNTEAYFSYFGDVFKKSKKGKKDENNEDYEKNLRHNFNVLRVLSFLRQICTHAYVKCTGGAKNNGDSTKVEAESLDALFNITEYFAKTAPELSKTINEIYKEGIDRINNDFVTNGKNNLYILSKVYPDMQRNELVKKYYQFVVCKEGNNVGINTRKLKESIISQHPWITTPQDNNKANDYESCRHKLYTIMCFILVAELDAHESIRDNMVAELRANMDGDDGRDAIYEKYAKDIYHIVKDKLLAMQKVFDEELVPVKVEGKNDPQQFTHGKLGKKEIESFCLSDKNTSDIAKVVYFLCNFLDGKEINELCCAMMNKFDGIGDLIDTAKQCGEEVKFIEEFACLSNCRKITNDIRVAKSISKMKNKVNIDNDIIYLDAIELLGRKIEKYQKDENGKILLGTDGKRLYTQEYKYFNDMFFNAGNHKVRNFIANNVMQSKWFFYVVRYNKPAECQIIMRNKTLVKFTLDDLPDMQIQRYYSSVFGDNNMPAVDEMRKRLLDKINQFSVRGFLDELDEIVLMSDEESKRNKSSEKEQKKSLIRLYLTIAYLITKSMVKINTRFSIACAMYERDYALLCQSEMKGGPWDGGAQALAVTRKFLNHDREVFDRYCAREAEIARLPSEERKPLRKANDKLLKQTHYTNHSYTYIVNNLNSFTDIDYCAKDVGLPAPNDKNDNASILGEMRNDIAHLNIVHDMVKYIEELKDISSYYAFYCYVLQRRLVGKDPNCQNKFKAKYAKELNDYGTYNKNLMWMLNLPFAYNLPRYKNLSSEFLFYDMEYNKKDDE

SEQ ID NO: 165 - DNA, 35 bp, Artificial Sequence
  Direct repeat
gaacccgtctatactagcgggctttagtacaaaac

SEQ ID NO: 166 - protein, 1001 aa, Artificial Sequence
  Metagenic hit contig NFIR01000008.1 (Eubacterium sp. An3, from chicken gut metagenome)
MAKKLRPKELREKRRMAEKEEHKKQEKLRKEQEELRKKQEKQREDQKELEKIKKEEGGEGEKKKSGAKALGLKSTFILDRDEQKMLMTSFGRGNKAVRDKYIIGDKVSDIDDSWENKKAALSVEVCGKSFNISKKENDDCEPVKVNNPVLSGNKKDDDLIHCRKNLEEMYFGQQFKDNIHIQLIYNILDIEKILAVQINNIVFILNNLLRWSGEEEFDLIGSLGVNHTYEEFRGRNKNYGKFSELIKQSQMRYFGSTFCLFNENEERITSENKKEWKRFEKKCYHLLAVLGMMRQATAHGDSKRRAEIYKLGKEFDRLEARGCRPEARKELDELYKKKIHEMNQGFLKNSKSDILMLFRIYNAESKEAKRKLAQEYYEFIMLKSYKNTGFSIKHLRETMIDKMDEDKKEKLKDDKYNPIRRKIYRIMDFMIYQYYQEPEHQEEAEELVRKLRNAEIEAKKELAYRKEAEKLKKELEKIIFNSVLPSCDRILSEMDERRNKKVNQESSDTDKEEPLDSEIAEGITFIKETAHSFSEMIYLLTVFLDGKEINILLTQLIHCFDNISSFMDTMEEENLLTKLKEDYEIFEESKEISRELRIINSFARMTEPVPKTERIMFIEAAQILGYSNGEKELEGYVDALLDTKNKTNDKKKKGFVRYIWNNVIKSTRFRYLVRYADPKKVRAFAANKKVVAFVLKDIPDDQIRAYYNSCFRQNSDSSSNNSNASWDADSNKRDISVSDMRKALTEKITGLNFGDFEEESKKGIRKEESDKNIIRLYLTVLYLVQKNLIYVNSRYFLAFHCAERDEMLYNGETIDNNKEKGSEKDWRKFAKQFIMEHSPKKKVKDYLAKNFEYSNKWSLKEFRNSVQHLNVIRDAHKYIKYINDNKDVQSYFALYHYLVQRYISERAANRTDKESLSEGRLQYYLSQVKEYRTYCKDFVKALNVPFAYNLPRYKNLSIDELFDRNNYLPNKAKKWIPEKKENGEYVMEDCGNKDAGQVENA

SEQ ID NO: 167 - DNA, 35 bp, Artificial Sequence
  Direct repeat
gaactacactctggctgaaagtcagggtctaaaac

SEQ ID NO: 168 - protein, 1006 aa, Artificial Sequence
  Metagenomic hit contig NFLV01000009.1 (Eubacterium sp. An11, from chicken gut metagenome)
MSKKQRPKDIRKRQEEEKREKYKKQEELRKKQEELRKEQEQRREDQKELEKIKKEVGEEGEKKKSRAKALGLKSTFILDRDEQKVLMTSFGQGNKAVRDKYIIGDKVSDINDDRKNKKAALLVEVCGKSFNISKKENDDCDPVKVNNPVVSRNKKDDDLIHCRKKLEELYFGEQFKDNIHIQLIYNILDIEKILAVQVNNIVFALNNLLSWSGEEKFDLIGYLGVNDTYEKFRDAKGKRKGLYEKFSTLIEKKRMRYFGSTFYPLNEKGEEITSNDKKEWEQFEKKCYHLLAVLGMMRQATAHGDSKRRAEIYKLGKEFDKSEARGCRQEARKELDDLYRKKIHEMNQSFLKNSKRDILMLFRIYDAESKEAKRKLAQEYYEFIMLKSYKNTGFSIKHLRETVIDKMDEDIKEKIKDDKYNPIRRKLYRIMDFVIYQYYQESEQQEEAMELVRKLRNAETKVEKELTYRKEAEKLKEELEKIIRNSILSVCDRILAEMNEKRHKKVNQESSDTDSEEPLDPEISEGITFIKETAHSFSEMIYLLTVFLDGKEINILLTQLIHCFDNISSFMDTMKEENLLTKLKEDYEIFEESKEISKELRIINSFARMTEPVPKTEKTMFIDAAQILGYSNDEKELEGYVDALLDTKNKTKDKERKGFEKYIWNNVIKSTRFRYLVRYADPKKVRAFAANKKVVAFVLKDIPDEQIKAYYNSCFSQNSDSSSNMSIAFQDGDSNKKGTSVHDMMRKALTEKITGLNFGDFEEESKKGIRREESDKNIIRLYLTVLYLVQKNLIYVNSRYFLAFHCAERDEVLYNGETIDNNKEKGSEKDWKKFAKEFIIEHPPKKKVKDYLAKNFEYSNKWSLRVFRNSVQHLNVIRDAYKYIKCIDDNKDVQSYFALYHYLVQRYISEMAENLTDKGELSEGRLQYYLSQVENYRTYCKDFVKALNVPFAYNLPRYKNLSIDELFDRNNYLPNKAKKWISEKKENGEYVMEDCGNKGAGQVENA

SEQ ID NO: 169 - DNA, 35 bp, Artificial Sequence
  Direct repeat
gaactacaccctggctgaaagtcagggtctaaaac

SEQ ID NO: 170 - protein, 1027 aa, Artificial Sequence
  Metagenomic hit from contig emb OBLI01020244 and emb OBLI01038679 (from pig gut metagenome)
MAKKITAKQRREERERQNKQKWAKKQADATAVFECEADIKPADSKDEDCTNIYIKREKKKTQAKAMGLKTVLGFDNKIAIASFMSSKDSKSSHIERITDPNGKTIREDVRMFDSNVDECSINLEKRMTVEERQKDGTIKKDEKDVKSTICNPYSNECGKDYIGIKSVAEELFFGRTFPNDNLRVQIAYNIFDIQKILGTYINNIIYSFYNLSRDESQSDNDVIGTLYMLKDFDGQKETDTFRQARALLERTEAYYSYFDNVFKKIDKNKKKSDDCKRERNEILRYNFNVLRVLSFLRQICAHAQVKISNEHDREKGGGLVDSLDALFNISRFFDAVAPELNEVINSVYSKGIDDINDNFVKNGKNNFYILSKIYPEVAREDLLREYYYFVVSKEGNNIGISTKKLKEAIIVQDMSYIKSEDYDTYRNKLYTVLCFILVKELNERTTIREQMVADLRANMNGDIGREDIYSKYAKIIYAQVKPRFDTMKSAFEEEAKDVIVPDKKKPVKFSHGKLDKNEIERFCITSANTDSVAKIIYFLCKFLDGKEINELCCAMMNKLDGINDLIETAEQCGAKVEFVDKFSVLSNCETISDQIRIVKSISKMKKEIAIDNDTIFLDALELLGRKIDKYKKDATGKYLKDENGKYLYSKEYDDFQYMFFKDSHRVRNFISNSVIKSKWFSYIVRYNQPSECRAIMKNKTLVKFALDELPDLQIQRYFVALYGDEDLPSYGEMRKILLKKLHDFSIKGFLDEIVLLSDLDMESQDKYCEKEQKKSLFRLYLTIAYLITKSMVKINTRFSIACATYERDYALLCASNKQERAWSSGATALALTRRFLNQDKLIFEKHYAREGEISKLPKEERKAMRKVNDQLLKRTHFSKHSYCYIVDNVNRLTGGECRTDKRVLPVLNEKNDNAGILLDFRKTIAHLNVVHKMVDYVDEIKGITSYYAFFCYVLQRMLVGNNLNEKNAIKEKYSATVKSFGTYSKDFMWLINLPFAYNLPRYKNLSNEQLFYDEEERNETEEQIDRL

SEQ ID NO: 171 - protein, 39 aa, Artificial Sequence
  Motif 1
  misc_feature (3)..(7): Xaa can be any naturally occurring amino acid
  misc_feature (9)..(9): Xaa can be any naturally occurring amino acid
  misc_feature (11)..(33): Xaa can be any naturally occurring amino acid
  misc_feature (35)..(39): Xaa can be any naturally occurring amino acid
NVXXXXXFXYXXXXXXXXXXXXXXXXXXXXXXXLXXXXX

SEQ ID NO: 172 - protein, 33 aa, Artificial Sequence
  Motif 2
  misc_feature (2)..(6): Xaa can be any naturally occurring amino acid
  misc_feature (8)..(10): Xaa can be any naturally occurring amino acid
  misc_feature (12)..(16): Xaa can be any naturally occurring amino acid
  misc_feature (18)..(28): Xaa can be any naturally occurring amino acid
  misc_feature (31)..(33): Xaa can be any naturally occurring amino acid
LXXXXXYXXXKXXXXXNXXXXXXXXXXXRDXXX

SEQ ID NO: 173 - protein, 19 aa, Artificial Sequence
  Motif 3
  misc_feature (5)..(16): Xaa can be any naturally occurring amino acid
  misc_feature (18)..(19): Xaa can be any naturally occurring amino acid
KEINXXXXXXXXXXXXIXX

SEQ ID NO: 174 - protein, 18 aa, Artificial Sequence
  Motif 4
  misc_feature (3)..(3): Xaa can be any naturally occurring amino acid
  misc_feature (5)..(7): Xaa can be any naturally occurring amino acid
  misc_feature (9)..(11): Xaa can be any naturally occurring amino acid
  misc_feature (13)..(17): Xaa can be any naturally occurring amino acid
PFXYXXXRXXXLXXXXXF

SEQ ID NO: 175 - protein, 979 aa, Artificial Sequence
  Metagenomic hit contig OJMM01002900 human gut metagenome sequenc
MGKHLNAKQRKLEKKLKNQQKDMMYTKSTDAVSVPTLKAAPTKAEMSQDTAEASTLITPGTLKTKAKAMGLKSTLVFDDKIVVTSFLNSKTEENEKCAHIEKIADCNGQTIVERPRMFNTSINAKKVDLSKDNDETNYPNPAFEDCGRDYINVKSALEKRVFGKTYNKDNLHVQIAYNIFDIKKIIGAYINNIIYIFYNLGREEYDAKKDIIGTQDSAYISKILNNTSAYFTYFDGVFKQITDRDSNKDREIKNSYNALVLKVLYYLRQFCMHGNTYTKRNEESFLSDTALYNAKEFFAKADPQINELIDAVYADGIKTINSDFMAHAKNNMYIICEVYKNEAEDSLMKEYYDFVVRKEGNNLGFNTRQLREILIDKYVGNLRGKKYNTFRNKLYTVLGFILVKEIKRNPKIQDSFIAKLRANQNGDEGKLNIYNEFAPKIWSVVSSKLNSAITCFDEESLSKFKGYKDIDESLISRYGITVANTDTLVKILYFLCKFLDGKEINELCCAMINKFDNINDLIKTAAQCGEDIEFVKEYKLFINSNDLSDQIRIVKSISKMKPELSKIGEALILDAIDILGYKINKYKYDAAGNRLVDSNNKPVYSEEYCAFKKDFFETCELDEFGRVKYNKKGKPVINHRRRNFIINNVLSSKWFFYVAKYNRPSECQKFMKSKKLIALVLKDVPETQIARYYQSVTGGRTQANSEAMRMTLIKLLHEFSIKNVLSDVGTMTASENKRQIENSRKERMKAIVKLYLTVVYLIAKSLVKVNTRFSIAFSAYERDVSLLADENELIALANNEDDKWKKGNYVFALTKHFWDNDEPYFDKYNNALQQIRSIVDPNERRLAYRANDKVVKHTHFNLHSYKYVKHNYEEISKASKIITAYRNNVQHLNVMNSITKYLGDISEVTSYYSLYCYTLQRLLLDDNNNDKFASIKGNLRKFGIYNKDFMWLLNIPFAYNLPRYKNLSNEEIFYDELQK

SEQ ID NO: 176 - DNA, 36 bp, Artificial Sequence
  Direct repeat
gtacaatagccctctcgtagttgagggctctgagac

SEQ ID NO: 177 - protein, 1009 aa, Artificial Sequence
  Metagenomic hit contig ODAI011611274.1 gut metagenome sequence
MKKKISLKEQRNTKKAENKLKYQKAQAERAAAAQQTAAGAESEENPCFDVVKDTKRKALNPLHVEIEAPSAKKSSVKANGLKSLLLTDGKTVMTSFGRGSEANVEKRFDETGTKTFDRDPELFSAKPLETGYRIQRFNASPKDAGLAYRPAGVRPDQIGAKAALEKRYFGKETPGDNIHVQIAYQIQDIEKLLAVYISNIIYAVNNVTGVSAMKDSKGRPVDLLGDYGILGEEGLTKRLQRIPEQADEEAKALQAFLCSERLSYFGKEFCLVRNSPKQPDKEEKRQYKLMRVLCLLGELRQFLVHGKKKEKEFAWLYRLDRQLSQEYRKLLGEFYDAQVDKVNKSFLTNSTVNLEVLFRALKTGTDPERKTVTQEYYQFTVRKEDGNLGFSLKTLREILLSAYKHEVRDKEYDSIRHKLYQLFSFALYHYYKTGVGAERREAFVAKLRAVMTAEAKQRAYADEAAEIWNDEGSGIRAAFLEILEAVDFGSAVKGIKARSSVAGDKRFAEWLEEVRIRPEGVSCFTKLMYLLTRFLDGKEINELLTGLINKLENIQSFLDVMQQEHAETGLSDAFSFFEYSGEIAAELRMTRSFARMAAADPEAKRFMVVDGAKLLGFNPKDTESEDEGIIRAIYGDACAEYLQFSEEEKEAFYVQEGLYGKEREKFSPYAYFHTDTSLRNFIAKNVVESARFRYVIRYVSPEIARKYARQEALVRFALHRVPLLQLRRYYQSCCGPKKDPDAAECVDFLAGVVNRVDFANFTDVRTGDSSKSEQEKKQKYQAIVGLYLTVVYWIVKNLVNVNSRYVMAFHILERDTVLLEGKRLFVGGMKAEDPFLLTDGYVSRQDAYVRKRIGENKRANRHGLNCVLENRNALGSDPASTDAAASLIWSYRNAAAHLTAVAAAQEYVSELREIHSYFEVYHYAMQRYLKSGAEFAELVSKNGPASGKIAAWANAVDRCHSFCKDWLWLLNVPFAYNPARYKNLSIANLFDKNEAAPVTEDASEQKEDE

SEQ ID NO: 178 - DNA, 36 bp, Artificial Sequence
  Direct repeat
gtactacacccctgcagttttgcaggggtctgaaac

SEQ ID NO: 179 - protein, 961 aa, Artificial Sequence
  Metagenomic hit contig OIZX01000427.1
MAKKKKTARQLREEMQQQRKQAIQKQQEQRQEKAAAARETAAPEQPAAAPVPKRQRKSLAKAAGLKSNFILDPQRRTTVMTAFGQGSTAILEKQIVDRAISDLQPVQQFQVEPASAAKYRLKNSRVRFPNVTADDPLYRRKDGGFVPGMDALRRKNVLEQRFFGKSFADNIHIQMIYSILDIHKILAAASGHIVHLLNIVNGSKDRDFIGMLAAHVLYNELNEEAKRSIADFCKSPRLIYYSAAFYETLDNGKSERRSNEDIFNILALMTCLRNFSSHHSIAIKVKDYSAAGLYNLRRLGPDMKKMLDTFYTEAFIQLNQSFQDHNTTNLTCLFDILNISDSARQKQLAEEFYRYVVFKEQKNLGFSVRKLREEMLLLPDAAVIADKRYDTCRSKLYNLMDFLILRVYRTGRADRCDKLPEALRAALTDEEKAVVYHKEALSLWNEMRTLILDGLLPQMTPENLSRLSGQKRKGELSLDDAMLKECLYEPGPVPEDAAPEEANAEYFCRMIYLATLFMDGKEINTLLTTLISKFENIAAFLQTMEQLNIEAELGPEYAMFTRSRAVAEQLRVINSFALMKKPQVNAKQQLYRAAVTLLGTEDPDGVTDEMLCIDPVTGKMLPPNQRHHGDTGLRNFIANNVVESRRFQYLIRYSDPAQLHQLASNKKLVRFVLSSIPDTQINRYYETCGQTRLAGRAAKVEFLTDMIAAIRFDQFRDVNQKERGANTQKERYKAMLGLYQTVLYLAVKNLVNINARYVMAFHCVERDMFLYDGELTDPKGESVSAFLAVNGKKGVQPQYLLLTQLFIRRDYLKRSACEQIQHNMENISDRLLREYRNAVAHLNVIAHLADYSADMREITSYYGLYHYLMQRHLFKRHAWQIRQPERPTEEEQKLIEQEQKQLAWEKALFDKTLQYHSYNKDLVKALNAPFGYNLARYKNLSIEPLFSKEAAPAAEIKATHA

SEQ ID NO: 180 - DNA, 36 bp, Artificial Sequence
  Direct repeat
actatagccctgccggaaatgacagggttctacaac

SEQ ID NO: 181 - protein, 963 aa, Artificial Sequence
  Metagenomic hit contig emb OCVV012889144.1
MSKNKESYAKGMGLKSALVSGSKVYMTSFEGGNDAKLEKVVENSEIVSLAEKESFSAEIFKKNIGCKIENKKFKHPKRYDVIADNPLYKGSVRQDMLGLKETLEKRYFNSADGTDNVCIQVIHNILDIEKILAEYITNAVYSFDNIAGFGEDIIGMGGFKPIYTYKQFKEPDKYNKKFDDILNNSRLGYYGKAFFEKNDLKHNPNKKKRDKNPYILKYDNECYYIIALLSGLRHWNIHSHAKDDLVSYRWLYNLDSILNREYISTLNYLYDDIADELTESFSKNSSANVNYIAETLNIDPSEFAQQYFRFSIMKEQKNMGFNVSKLREIMLDRKELSDIRDNHRVFDSIRSKLYTMMDFVIYRYYIEEAAKTEAENRNLPENEKKISEKDFFVINLRGSFDENQKEKLYIEEAKRLWEKLKDIMLKIKEFRGEKVKEYKKEVPRIERILPQGKDISAFSKLMYMLSMFLDGKEINDLFTTLINKFDNIQCFLKIMPLIGVNVKFTEDYAFFNKSEKIADELRLIKSFARMGEPVANTKRVMMIDAVKILGTDLSDDELVNMADSFFNDSEGNLLKKGKHGMRNFIINNVIENKRFHYLIRYGDPAHLHEIAKNEAVVRFVLGRIADIQKKQGKDGKNQIDRYYEICVGKDRGKTVSQKLDELTKIIVNMNYDQFEQKKEIIENTRTKTKYMRYDEEQKLRKDNAEREKFKKIISLYLTVLYYVVKNIVNINSRYVIGFHCLERDAQLYSEKYNKEIDKKISSLTKFCLGESDEKKLKALAKKSLEELKTTNSKLYENYIKYSDERKAEEAKRQINRERAKTAMNAHLRNTKWNDIMYGQLKDLADSKSRICSEFRNKAAHLEVARYAHMYINDISEVKSYFRLYHYIMQRRIIDVIENNPKAKYEGKVKVYFEDVKKNKKYNKNLLKLMCVPFGYCIPRFKNLSIEQMFDMNETDNSDKKKEK

SEQ ID NO: 182 - DNA, 36 bp, Artificial Sequence
  Direct repeat
catatacaaccccgtaaagttacggggttctgaaac

SEQ ID NO: 183 - protein, 911 aa, Artificial Sequence
  Metagenomic hit contig emb OCTW011587266.1
MKQNDRENNNKIKKSAAKAVGVKSLARLSDGSTVVSSFGKGAAAELESLITGGEIRKLSDKAILEITDDTQNKNAYNVKSSRIPNLTARTDKLSDKSGMDDLGFKRELELEVFGQCFDDSIHIQIAHAVFDIQKSLAAVIPNVLYTLNNLDRSYSTDNTSDKKDIIGNTLNYQHSYESFNVEKRGEFTEYYNAAKDRFSYFPDILCVLEKVNGKDRYQPKSEKDAFNVLSSVNMLRNSLFHFAPKSNDGKARIAVFKNQFDSDFSHITSTVNKIYSAKIAGVNENFLNNEGNNLYIILKATNWDIKKIVPQLYRFSVLKSDKNMGFNMRKLREFAVESKNIDLSRLNDKFLTNNRKKLYKVIDFIIYYHLNKVLKDSFVDDFVAALRASQSEEEKEKLYAQYSERLFADEGLKSAIKKAVDMISDTKSNIFKMKTPLDKALIENIKVNSDASDFCKLIYVFTRFLDGKEINILLNSLIKKFQDIHSFNTTVKKLSENNLIINADYVDDYSLFEQSGTVARELMLIKSISKMDFGLDNINLSFMYDDALRTLGVSDENLPEVKREYFGKTKNLSAYIRNNVLENRRFKYVIKYIHPSDVQKIACNKAIAGFVLNRMPDTQIKRYYDSLINKGATDIQAQAKALLDCITGISFDAIKDDKHLHKSKEKSPQRSADRERKKAMLTLYYTIVYIFVKQMLHINSLYTIGFFYLERDQRFIYSRAKKENKNPSKNSYLNDFRSVTAYFIPSEIMKRIEKNENKGFLEDFEALWNSCGKTSRLRKEDVLLYARYISPDHALKNYKMILNSYRNKIAHINVIMSAGKYTGGIKRMDSYFSVFQHLVQCDILSNPNNKGKCFESESLKPLLLDMKFDGTDEKLYSKRLTRALNIPFGYNVPRYKNLTFEKIYLKSSINE

SEQ ID NO: 184 - DNA, 36 bp, Artificial Sequence
  Direct repeat
cttatacaacacccattttcacagtgggtctataac

SEQ ID NO: 185 - protein, 904 aa, Artificial Sequence
  Metagenomic hit contig emb OGNF01009141.1
MADIDKKKSSAKAAGLKSTFVLENNKLLMTSFGNGNKAVIEKIIDEKVDSINEPEVFSVTPCDKKFELQPAKRGLAADSLVDNPLKSKKTAGDDAIHSRKFLERQFFDGNTFNDNIHIQLIYNILDIEKILSVHVNDIVYSVNNILSRGEGMEYNDYIGTLNLKSFETYKNNLVNKKKFDLDRVKKIPQLAYFGSAFYNTPEDTSAKITKTKIKSNEEIYYTFMLLSTARNFSAHYLDRNRAKSSDAEDFDGTSVIMYNLDNEELYKKLYNKKVHMALTGMKKVLDANFNKKVEHLNNSFIKNSAKDFVILCEVLGIKSRDEKTKFVKDYYDFVVRKNYKHLGFSVKELRELLFANHDSNKYIKEFDKISNKKFDSVRSRLNRLADYIIYDYYNKNNAKVSDLVKYLRAAADDEQKKKIYLNESINLVKSGILERIKKILPKLNGKIIGNMQPDSTITASMLHNTGKDWHPISENAHYFTKWIYTLTLFMDGKEINDLVTTLINKFDNIASFIEVLKSQSVCTHFSEERKMFIDSAEICSELSAMNSFARMEAPGASSKRAMFVEAARILGDNRSKEELEEYFDTLFDKSASKKEKGFRNFIRNNVVDSNRFKYLTRYTDTSSVKAFSNNKALVKFAIKDIPQEQILRYYNSCFGASERYYNDGMSDKLVEAIGKINLMQFNGVIQQADRNMLPEEKKKANAQKEKYKSIIRLYLTVCYLFFKNLVYVNSRYYSAFYNLEKDRSLFEINGELKPTGKFDEGHYTGLVKLFIDNGWINPRASAYLTVNLANSDETAIRTFRNTAEHLEALRNADKYLNDLKQFDSYFEIYHYITQRNIKEKCEMLKEQTVKYNNDLLKYHGYSKDFVKALCVPFGYNLPRFKNLSIDALFDKNDKREKLKKGFED

SEQ ID NO: 186 - DNA, 36 bp, Artificial Sequence; identical to SEQ ID NO: 159
  Direct repeat

SEQ ID NO: 187 - protein, 933 aa, Artificial Sequence
  Metagenomic hit contig emb OIEN01002196.1
MERQKRKMKSKSKMAGVKSVFVIGDELLMTSFGDGDDAVLEKDIDENGVVNDCRNPAAYDAVYGTDSIRVKKTNNNIRAKVNNPLAKSNIRSEESALFRTRVNEYKREQKDKYETLFFGKTFDDNIHIQLISKILDIEKTFSVVIGNIVYAINNLSLEQSIDRPIDIFGDKNTQGISLREDNDYLKTMLPRCEYLFHNILNSDSDNNSKMNYNKVNKGKEEKDNRNNENIEKLKKALEVIKIIRVDSFHGVDGIKGDQKFPRSKYNLAVNYNEEIQKTISEPFNRKVEEVQQDFYRNSCVNIDFLKEIMYGSNYTDRGSDSLECSYFNFAILKQNKNMGFSITSIRECLLDLYELNFESMQNLRPRANSFCDFLIYDYYCKNESERANLVDCLRSAASEEEKKNIYFQTAERVKEKFRNAFNRISRFDASYIKNSREKNLSGGSSLPKYSFIEGFTKRSKKINDNDEKNADLFCNMLYYLAQFLDGKEINIFLTSIHNIFQNIDSFLKVMKEKGMECKFQKDFKMFSHAGHVAKKIEIVISLAKMKKTLDFYNAQALKDAVTILGVSKKHQYLDMNSYLDFYMFDNRSGATGKNAGKDHNLRNFLVSNVIRSRKFNYLSRYSNLAEVKKLAQNPSLVQFVLSRIEPSLICRYYESSQGISSEGITIDEQIKKLTGIIVDMNIDSFENINNGEIGMRYSKATPQSIERRNQMRVCVGLYLNVLYQIEKNLMNVNARYVLAFAFAERDALMLNFTLEECKKNKKRSSGGFSFIEMTQFFIDKKLFKVATEAIKKNVLKYNGNPESLNHIPGEYICKNMEGYHENTVRNFRNMVAHLTAVARVPLYISEVTQIDSYYALYHYCMQMNILQGIEQSGKILDNIKLKNALENARVHRTYSKDAVKYLCLPFAYNISRYKALTIKDLFDWTEYSCKKDE

SEQ ID NO: 188 - DNA, 36 bp, Artificial Sequence
  Direct repeat
gccccttgaccttacgaaatggtaaggttccaaaac

SEQ ID NO: 189 - protein, 1034 aa, Artificial Sequence
  Metagenomic hit contig e-k87 11092736
MKRQKTFAKRIGIKSTVAYGQGKYAITTFGKGSKAEIAVRSADPPEETLPTESDATLSIHAKFAKAGRDGREFKCGDVDETRIHTSRSEYESLISNPAESPREDYLGLKGTLERKFFGDEYPKDNLRIQIIYSILDIQKILGLYVEDILHFVDGLQDEPEDLVGLGLGDEKMQKLLSKALPYMGFFGSTDVFKVTKKREERAAADEHNAKVFRALGAIRQKLAHFKWKESLAIFGANANMPIRFFQGATGGRQLWNDVIAPLWKKRIERVRKSFLSNSAKNLWVLYQVFKDDTDEKKKARARQYYHFSVLKEGKNLGFNLTKTREYFLDKFFPIFHSSAPDVKRKVDTFRSKFYAILDFIIYEASVSVANSGQMGKVAPWKGAIDNALVKLREAPDEEAKEKIYNVLAASIRNDSLFLRLKSACDKFGAEQNRPVFPNELRNNRDIRNVRSEWLEATQDVDAAAFVQLIAFLCNFLEGKEINELVTALIKKFEGIQALIDLLRNLEGVDSIRFENEFALFNDDKGNMAGRIARQLRLLASVGKMKPDMTDAKRVLYKSALEILGAPPDEVSDEWLAENILLDKSNNDYQKAKKTVNPFRNYIAKNVITSRSFYYLVRYAKPTAVRKLMSNPKIVRYVLKRLPEKQVASYYSAIWTQSESNSNEMVKLIEMIDRLTTEIAGFSFAVLKDKKDSIVSASRESRAVNLEVERLKKLTTLYMSIAYIAVKSLVKVNARYFIAYSALERDLYFFNEKYGEEFRLHFIPYELNGKTCQFEYLAILKYYLARDEETLKRKCEICEEIKVGCEKHKKNANPPYEYDQEWIDKKKALNSERKACERRLHFSTHWAQYATKRDENMAKHPQKWYDILASHYDELLALQATGWLATQARNDAEHLNPVNEFDVYIEDLRRYPEGTPKNKDYHIGSYFEIYHYIRQRAYLEEVLAKRKEYRDSGSFTDEQLDKLQKILDDIRARGSYDKNLLKLEYLPFAYNLPRYKNLTTEALFDDDSVSGKKRVAEWREREKTREAEREQRRQR

SEQ ID NO: 190 - DNA, 30 bp, Artificial Sequence
  Direct repeat 1
gtgagaagtctccttatggggagatgctac

SEQ ID NO: 191 - DNA, 30 bp, Artificial Sequence
  Direct repeat 2
gtagcatctccccataaggagacttctcac

SEQ ID NO: 192 - DNA, 36 bp, Artificial Sequence
  Direct repeat 3
gctagggcttgtaggaattccttgctatggtacaat

SEQ ID NO: 193 - DNA, 36 bp, Artificial Sequence
  Direct repeat 4
attgtaccatagcaaggaattcctacaagccctagc

SEQ ID NO: 194 - protein, 116 aa, Artificial Sequence
  Gut metagenome contig6893000291
MYPFINFAIFRYYNVYHKEADYLVDSLRASMNEVEKDAVYRREAVRIWPRLKKLILNHILPEMTGSKIKEKDAKPDPEMDASMIDSVKIGTESTLFTKIIFLTTLFLNGKETNDLI

SEQ ID NO: 195 - protein, 30 aa, Artificial Sequence
  exemplary Cas13d motif sequence
  misc_feature (2)..(10): Xaa can be any naturally occurring amino acid
  misc_feature (12)..(16): Xaa can be any naturally occurring amino acid
  misc_feature (18)..(29): Xaa can be any naturally occurring amino acid
LXXXXXXXXXKXXXXXNXXXXXXXXXXXXD

SEQ ID NO: 196 - protein, 18 aa, Artificial Sequence
  exemplary Cas13d motif sequence
  misc_feature (1)..(11): Xaa can be any naturally occurring amino acid
  misc_feature (13)..(13): Xaa can be any naturally occurring amino acid
  misc_feature (15)..(18): Xaa can be any naturally occurring amino acid
XXXXXXXXXXXFXYXXXX

SEQ ID NO: 197 - protein, 15 aa, Artificial Sequence
  exemplary Cas13d motif sequence
  misc_feature (2)..(4): Xaa can be any naturally occurring amino acid
  misc_feature (6)..(15): Xaa can be any naturally occurring amino acid
YXXXRXXXXXXXXXX

SEQ ID NO: 198 - protein, 940 aa, Artificial Sequence
  Ga0224415 10007274
MIEKKKSYAKGMGLKSTIVSGSKVYMTTFGDGSEARLEKVVENDSIKTLHEGEAFSAEMTDNNAGYKIGNVKFSHPNGYDVVANNPFYTGPVQQDMLGLKEILERRYFGSSTDGNNTICIQIIHNILDIEKILAEYITNAVYATNNIIDPDNDVIGGKKFTSIKTFAQFSASDSSNDFEQFLKNPRLGYLGKAFFYKDGKRNNRQKDPIECYHLLALLCGLRNWVVHNNEEKDLIKYTWLYNLDKYLDAEYITTLNYMYNDIGDELTDSFSKNSAANINYIAETLGIDPKTFAEQYFRFSIMKEQKNLGFNLTKLREVMLDRKDMSEIRENHNDFDSIRAKVYTMMDFVIYRYYIEEAAKVNAANKSLPDNEKSLSEKDIFVISLRGSFNEDQKDRLYYDEAQRLWSKVGKLMLKIKKFRGKDTRKYKNMGTPRIRRLIPEGRDISTFSKLMYALTMFLDGKEINDLLTTLINKFDNIQSFLKVMPLIGVNAKFAEEYSFFNNSEKIADELRLIKSFARMGEPVADARRAMYIDAIRILGTDLSDDELKALADSFSLDENGNKLGKGKHGMRNFIINNVITNKRFHYLIRYGNPVHLHEIAKNEAVVKFVLGRIADIQKKQGQNGKNQIDRYYETCIGKDSSKSVAEKVNALTKIITGMNYDQFDSRRNVIENTGAGNAEREKYKKIISLYLTVIYHILKNIVNINSRYVIGFHCVERDAQLYKEKGYDINLKKLKDKGFTSVTKLCAGIDEECKDVEKEMTERAKASFAALETANPKLYATYINYSDEEKNAELRKQINREKAKTALNAHLRNTKWNVIIREDLLRRDNKACKIFRNKVAHLEAIRYAHLYINDIAEVNSYFQFYHYIMQRRIMAERYDKSSGKVREYFDAVNNEKKYNDRLLKLLCVPFGYCIPRFKNLSIEALFDMNEAVKFDKEKK

SEQ ID NO: 199 - DNA, 36 bp, Artificial Sequence
  Direct repeat
caagtaaacccctaccaagtggtcggggtttgaaac

SEQ ID NO: 200 - protein, 1057 aa, Artificial Sequence
  EMG 10003641
MEETKVTKETTIEKQSTKRHKQKSKKTATKMSGLKSALVINNHEMLLTSFGKGNNAIAEKRYILDGDIETINNKNKKFDANNDSKVVVIKGISNPNGQLTNPLFDQSPTAIQPNRTSGNDMIGIRRMLERKYFVHNEENKEFQDNIRIQIAYCILDIEKILMPHINNICFEINNMLRLEGYQEDSFMGSFNLYKPYDAFIATTDDKESSRRDNFAKLMTSKQVRYLGNALYSDSLSNLTKDEILDGKRSKELKKYYQELCLLGMVRQSMIHSNQFNSSIYTLDSSYDSTMNTAELLGKGDDSSLVALATDARVEARAILDEIYKKGVDSINNSFLSNSINDLENLFKIYKCDSSEKKTELIKQYYDFCIRKPQMNMGFSITTIREGMFTRCSEANTLLLCDEGSTVKLNVHDTMKSKFYKNLDFMIYKYYKYENPEKGEKLIEDLRSKIKGKKKEDEDKKQRYAEESACILKAKRDIIKKDLTEAANKDLFADLVKSNKNEKQKFKNEYEELLKPFMIPVKVDYFSELIYLVTRFLSGKEINDLLTQLINKFENIAAFIRMYQNDQGKLEFTANYKMFEIDPQKDIPKDGKRVLSGSAKIAYYLRTINYIARMESFEIKSDKTAINDAISLLGYNSNEHRDEFITYTMAKHVVDKYQNTDYQKIVKDFLSANKTLDCKSKNMQAFVSELKNAHLSENYEQREKEIYELADTNLPAYFSEEDKEKLARYIVHSDGTYKKFLKESFYAIEELPNEGFRNFISNNVINSRRFNYIMRFCNPEKIANIGKNKVLISFALSSLAEKTDMIAKYYRVFCDRIDDQKTMEDYLVNKLTKISYTEFLNVNQKANAEKNKEKDRSQKLIGLYITLLYEIVKNLVNINSRYNIAFQRCDNDSIMILQGQYDERAVQESKLTKKFISNQKLNSYSCRYLTHNISQLDRCNDFIRQYRNKVAHLEVVSNIDEYLSGIKHIESYYALYHYLMQKCLLKNYRIEDHSQNEYKNLNDFSSKLDKHGTYVKDFVKALNVPFGYNLPRYKNLSIDELFDRNKLKTGGTIEMKGE

SEQ ID NO: 201 - DNA, 36 bp, Artificial Sequence
  Direct repeat
gaactacacccctgcagaaatgctggggtctgaaac

SEQ ID NO: 202 - protein, 973 aa, Artificial Sequence
  Ga0129306 1000735
MQKQREQQTVTDESERKKKPLKSGAKAAGLKSVFVLSEGKELLTSFGRGNEAVPEKRVTGGTIANARTDNKEAFSAALQNKRFEVFGRTAGSSDDPLAVSRAPGQDLIGAKTALEERYFGRAFADNIHMQVIYAIQDINKILAVHANNIVYTLNNLDREADPETDDFIGSGYLTLKNTFETYCDPAALNEREREKVTVSKQHFDAFMQNPRLAYYGNAFFRKLSKAERLARGREIFDKESPERRQEILGSRGKNKSVDDEIRALAPEWVKREERDVYSELVLMSELRQSCFHGQQKNSARIFRLDNDLGPGVDGARELLDRLYAEKINDLRSFDKTSASSNFRLLFNAYHADNEKKKELAQEFYRFSVLKVSKNTGFSIRTLREKIIEDHAAQYRDKIYDSMRKKLFSTFDFFLWRFYEEREDEAEELRACLRAARSDEEKEQIYAEAAASCWPSVKPFVESVAATLCDVVKGRTKLNKLKLSADESTLVRNAIDGVRISPRASYFTKLIYLMTLFLDGKEINDLLTTLIHAFENIDSFLSVLGSERLERTFDANYRIFADSGVIAQELRAVNSFARMTTEPFNSKLVMFEDAAQLFGMSGGLVEHAEELREYLDNKMLDKTKLRLLPDGKVDTGFRNFIISNVTESRRFRYLVRYCEPRAVRDYMSCRPLIRLTLRDMPDTILRRYYEQSVGAATVDRERILDTLADKLLSLRFTDFENVNQRANAERNREKQKMMGIISLYLNVAYQIVKNLVYVNARYTMAYHCAERDTELLLNAAGEGNLLRRDRSWPARLHLPRRALARRRDRVEVMERDVARGPEAYNRDEWLGLVRTLRREKRVCDNLHNNYAYLCGADAEPGDASLSLLFVYRNKAAHLSVLNKGGRLSGDLKEAKSWFYVYHFLMQRVLEEEFRNTQALPERLRELLMMAERYRGCSKDLIKVLNLTFAYNLPRYKNLSIDGRFDKNHPDPSDE

SEQ ID NO: 203 - DNA, 36 bp, Artificial Sequence
  Direct repeat
ccactacacccctgtcgaacaacgggggtctaaaac

SEQ ID NO: 204 - protein, 854 aa, Artificial Sequence
  Ga0129317 1008067
MKKQKKSLVKAAGLKSAFVVGDSVYLTSFGKGNAARLDTKINPDNSTERYVSDSEKHTLKINSITDTELRLSGPFPKQAEAKNPTHKKDNEQKNTRQDMLGLKSTLEKFYFGSTFDDNIHIQIIHNIQDIAKILAAHSNNAGYALDNMLAYQGVEFSDMIGYMGTSRTFDNYDPNHKNNKDFFRFLKLPRLGYFGSAFYSQKGKDFEKRSDEEVYNICALMGQIRQCCFHGKQEKYQLKWLYNFHNFKSNKPFLDTLDKHFDEMIDRINKNFIKNNTPDLIILSGLYPDMAKKELVRLFYDFTTVKEYKNMGFSVKKLREKMLESEEASDFRDKDYDSVRRKLYKLMDFCIYYLYYSDSERNENLVSRLRESLTDENKDIIYSKEAKIVWNELRKKFSTILDNVKGSNIKKLENVKEKFISEDEFDDIKLDIDISYFSKLMYVMCYFLDGKEINDLLTTLVSKFDNIGSIIEAATQIGINIEFIDDFKFFDRSKDISVELNIIRNFARMQAPVPNAKRAMQEDAIRILGGSEEDIFSILDDMTGYDKSGKKLAQSKKGFRNFIINNVVESSRFKYIVRYSNPQKIRKLANNSVVVGFVLGKLPDAQIESYFNSCLPNRVYSTPDKARESLRDMLHNISFNDFADVKQDDRRATPEEKVEKERYKAIIGLYLTVMYHLVKNLVYVNSRYVMAFHCLERDAMHYDVSLDNYRDLIRHLISEGDSSCNHFISHNRRMRDCIEENVKNSEQLIFGKEDAVIRFRNNVAHLSAIRNANEYIGDIREITSYFALYHYLMQRKLIDDCKVNDTAHKYFEQLTKYKTYVMDMVKALCSPFGYNLPRFKNLSIEGKFDMHESK

SEQ ID NO: 205 - DNA, 36 bp, Artificial Sequence
  Direct repeat
gaactacactactgtaattttgcagtagtctaaaac

SEQ ID NO: 206 - protein, 965 aa, Artificial Sequence
  Ga0224415 10048792
MSKKENRKSYVKGLGLKSTLVSDSKVYLTTFADGSNAKLEKCVENNKIICISNDKEAFAASIANKNVGYKIKNDEKFRHPKGYDIISNNPLLHNNSVQQDMLGLKNVLEKRYFGKSSGGDNNLCIQIIHNIIDIEKILSEYIPNVVYAFNNIAGFKDEHNNIIDIIGTQTYNSSYTYADFSKDKSDKKYIEFQKLLKNKRLGYWGKAFFTGQGNNAKVRQENQCFHIIALLISLRNWATHSNELDKHTKRTWLYKLDDTNILNAEYVKTLNYLYDTIADELTKSFSKNGAVNVNYLAKKYNIKDDLPGFSEQYFRFSIMKEQKNLGFNISKLRENMLDFKDMSVIRDDHNRYDKDRSKIYTMMDFVIYRYYIDNNNDSIDFINKLRSSIDEKSKEKLYNEEANRLWNKLKEYMLYIKEFNGKLASRTPDRDGNISEFVESLPKIHRLLPRGQKISNFSKLMYLLTMFLDGKEINDLLTTLINKFENIQGFLDIMPEINVNAKFEPEYVFFNKSHEIAGELKLIKGFAQMGEPAATLKLEMTADAIKILGTEKEDAELIKLAESLFKDENGKLLGNKQHGMRNFIGNNVIKSKRFHYLIRYGDPAHLHKIATNKNVVRFVLGRIADMQKKQGQKGKNQIDRYYEVCVGNKDIKKTIEEKIDALTDIIVNMNYDQFEKKKAVIENQNRGKTFEEKNKYKRDNAEREKFKKIISLYLTVIYHILKNIVNVNSRYILGFHCLERDKQLYIEKYNKDKLDGFVALTKFCLGDEERFEDLKAKAQASIQALETANPKLYAKYMNYSDEEKKEEFKKQLNRERVKNARNAYLKNIKNYIMIRLQLRDQTDSSGYLCGEFRDKVAHLEVARHAHEYIGNIKEVNSYFQLYHYIMQCRLYDVLKNNTKAEAMVKGKAKEYFEALEKEGTYNDKLLKIACVPFGYCIPRYKNLSMEELFDMNEEKKFKKKAPENT

SEQ ID NO: 207 - DNA, 36 bp, Artificial Sequence
  Direct repeat
caagtaaacccctaccaaatgtaaggggtttgaaac

SEQ ID NO: 208 - protein, 1022 aa, Artificial Sequence
  160582958 gene49834
MKNSVTFKLIQAQENKEAARKKAKDIAEQARIAKRNGVVKKEENRINRIQIEIQTQKKSNTQNAYHLKSLAKAAGVKSVFAIGNDLLMTGFGPGNDATIEKRVFQNRAIETLSSPEQYSAEFQNKQFKIKGNIKVLNHSTQKMEEIQTELQDNYNRPHFDLLGCKNVLEQKYFGRTFSDNIHVQIAYNIMDIEKLLTPYINNIIYTLNELMRDNSKDDFFGCDSHFSVAYLYDELKAGYSDRLKTKPNLSKNIDRIWNNFCNYMNSDSGNTEARLAYFGELFYKPKETGDAKSDYKTHLSNNQKEEWELKSDKEVYNIFAILCDLRHFCTHGESITPSGKPFPYNLEKNLFPEAKQVLNSLFEEKAESLGAEAFGKTAGKTDVSILLKVFEKEQASQKEQQALLKEYYDFKVQKTYKNMGFSIKKLREAIMEIPDAAKFKDDLYSSLRHKLYGLFDFILVKHFLDTSDSENLQNNDIFRQLRACRCEEEKDQVYRSIAVKVWEKVKKKELNMFKQVVVIPSLSKDELKQMEMTKNTELLSSIETISTQASLFSEMIFMMTYLLDGKEINLLCTSLIEKFENIASFNEVLKSPQIGYETKYTEGYAFFKNADKTAKELRQVNNMARMTKPLGGVNTKCVMYNEAAKILGAKPMSKAELESVFNLDNHDYTYSPSGKKIPNKNFRNFIINNVITSRRFLYLIRYGNPEKIRKIAINPSIISFVLKQIPDEQIKRYYPPCIGKRTDDVTLMRDELGKMLQSVNFEQFSRVNNKQNAKQNPNGEKARLQACVRLYLTVPYLFIKNMVNINARYVLAFHCLERDHALCFNSRKLNDDSYNEMANKFQMVRKAKKEQYEKEYKCKKQETGTAHTKKIEKLNQQIAYIDKDIKNMHSYTCRNYRNLVAHLNVVSKLQNYVSELPNDYQITSYFSFYHYCMQLGLMEKVSSKNIPLVESLKNEANDAQSYSAKKTLEYFDLIEKNRTYCKDFLKALNAPFSYNLPRFKNLSIEALFDKNIVYEQADLKKE

SEQ ID NO: 209 - DNA, 36 bp, Artificial Sequence
  Direct repeat
gaactacacccctctgttcttgtaggggtctaacac

SEQ ID NO: 210 - protein, 998 aa, Artificial Sequence
  250twins 35838 GL0110300
MGNKQRVSAQKRRENAKLCNQQKARQAESQRDKIKNMNVEKMKNINTNDIKHTKTTAKKLGLKSTIIADKKIILTSFINEQSSKTANIEKVAGFKGDTIDTISYTPRMFRSEINPGEIVISKGDDLSEFANPANFPIGRDYVKIRSALEKQYFGKEFPEDNLHVQIAYNVADIKKILSVYINNIIYMFYNLARSEEYDIFYNSQSENSGRDCDVIGSLYYQASYRNQDANRFEKDGKKKAIDSLLDDTRAYYTYFDGLFSVPKREDDGKIKESEKEKAKDQNFDVLRLLSVGRQLTFHSDKSNNEAYLFDLSKLTRAAQDENRRQDIQSLLNILNSTCRSNLEGVNGDFVKHAKNNLYVLNQLYPSLKANDLIGEYYNFIVKKENRNIGIRLITVRELIIEHNYTNLKDSKYDTYRNKIYTVLNFILFREIQENSIAIKNFREKLRSTEKAEQPALYQAFANKIYPMVQAKFAKAIDLFEEQYKTKFKSEFKGGISIENMQQQNILLQTENIDYFSKYVLFLTKFLDGKEINELLCALINKFDNIADLLDISKQIGTPVVFCADYESLNDAAKIAENIRLIKNIAHLRPAIQEAQSSKDNADAAGTPATLLIDAYNMLNTDIQLVYGEAAYEELRKDLFERKNGTKYNKKGKKVDVYDHKFRNFLINNVIKSKWFFYIAKYVKPADCAKMMSNKKMIEFALRDLPETQIKRYYYTITGNEALGDAESLKGVIIEQLHAFSIKNTLLSIKNMGEGEYKIQQIGSSKEKLKAIVNLYLTVAYLLTKSLVKVNIRFSIAFGCLERDLVLQKKSEKKFDAIINEILLEDDKIRKECDKERAQAKTLPRELAQERFAQIKRRESGCYFKSYHVYDYLSKNSNEFKQNHIDFAVTSYRNNVEHLNVVHCMTKYFSEVKDVKSYYGVYCYIMQRMLCDELIIKNQDKPDVRQTFEEYNRLLKDHGTYSKNLMWLLNFPFAYNLARYKNLSNEDLFNAKNNDQKSK

SEQ ID NO: 211 - DNA, 36 bp, Artificial Sequence
  Direct repeat
gtacaatagcccgttgaaatagatgggttctaagac

SEQ ID NO: 212 - protein, 1020 aa, Artificial Sequence
  250twins 36050 GL0158985
MKKKHQSAAEKRQVKKLKNQEKAQKYASEPSPLQSDTAGVECSQKKTVVSHIASSKTLAKAMGLKSTLVMGDKLVITSFAASKAVGGAGYKSANIEKITDLQGRVIEEHERMFSADVGEKNIELSKNDCHTNVNNPVVTNIGKDYIGLKSRLEQEFFGKTFENDNLHVQLAYNILDIKKILGTYVNNIIYIFYNLNRAGTGRDERMYDDLIGTLYAYKPMEAQQTYLLKGDKDMRRFEEVKQLLQNTSAYYVYYGTLFEKVKAKSKKEQRAKEAEIDACTAHNYDVLRLLSLMRQLCMHSVAGTAFKLAESALFNIEDVLSADLKEILDEAFSGAVNKLNDGFVQHSGNNLYVLQQLYPNETIERIAEKYYRLTVRKEDLNMGVNIKKLRELIVGQYFPEVLDKEYDLSKNGDSVVTYRSKIYTVMNYILLYYLEDHDSSRESMVEALRQNREGDEGKEEIYRQFAKKVWNGVSGLFGVCLNLFKTEKRNKFRSKVALPDVSGAAYMLSSENIDYFVKMLFFVCKFLDGKEINELLCALINKFDNIADILDAAAQCGSSVWFVDSYRFFERSRRISAQIRIVKNIASKDFKKSKKDSDESYPEQLYLDALALLGDVISKYKQNRDGSVVIDDQGNAVLTEQYKRFRYEFFEEIKRDESGGIKYKKSGKPEYNHQRRNFILNNVLKSKWFFYVVKYNRPSSCRELMKNKEILRFVLRDIPDSQVRRYFKAVQGEEAYASAEAMRTRLVDALSQFSVTACLDEVGGMTDKEFASQRAVDSKEKLRAIIRLYLTVAYLITKSMVKVNTRFSIAFSVLERDYYLLIDGKKKSSDYTGEDMLALTRKFVGEDAGLYREWKEKNAEAKDKYFDKAERKKVLRQNDKMIRKMHFTPHSLNYVQKNLESVQSNGLAAVIKEYRNAVAHLNIINRLDEYIGSARADSYYSLYCYCLQMYLSKNFSVGYLINVQKQLEEHHTYMKDLMWLLNIPFAYNLARYKNLSNEKLFYDEEAAAEKADKAENERGE

SEQ ID NO: 213 - DNA, 36 bp, Artificial Sequence
  Direct repeat
gtacaatagccctgcagtaaggcagggttctaagac

SEQ ID NO: 214 - protein, 903 aa, Artificial Sequence
  31009 GL0034153
MGSRGVIIMTEKRKSRAKALGVKSAFLKDDDVIMTSFGRGNDAVVEKIIKNNEVQNINIDKPVYDVVGVEKETGIINVVGTKRGINTINKKKQYANTQVSQKRMGMDLIQRKDKLEKVFFNENFNDNIHIQLIYNILDIEKILSVYVNNIVYALGNLERDNSDDEKDLIGYASTLNSYEDFINKNLVKQNENIDKFIENGNRLGYFGNVFYKNKNELKDKKDIFDMLCLLGSLRQFCFHFKGAKFEGVEQISNSWLYNLSQLHNEFKSTLDSFYNEKIEDINGNFIEKNKVNIQILCNDLKLDKNKLVQDYYNFLISKNHKNMGFSIKKIREYILDIDYASYIKEQGYDSVRSKLFTLIDFIIYDLYVNKEKDRIDDIVSKLRGAIYDYKKDDIYKAEADWVWKKLNRQIKALTKLLSNRRIFSQDNDITNWNGVEFEKIGEQKLEDNADYFCKLMYFVTLFLDGKEINDLLTTLINKFDNIRSFIEVMEEMSLKCEFMEEYKFFNESKDICLRLKEIHSFARMKRPLDNKNVEKEMYKDAISILMKDSSIENSNIDVIFNTYIYQKDNKNAKKDFRNFIIKNVIKSNRFIYLIKYSNPTNVRKFASNTNVIKFVLGTLPDKQLERYYKSCGLSDGIGKTEWVRELSEIITGIDYSDFLNVKQRAKSKEEKEDKAKKQAIVTLYLTILYILTKNLVNVNSRYVIAVHCIERDSELYKTELYEKLKPEQPEKLYKIKPDKPLQPAQYFLFTKYLLQNDFFGEYTSKKNQYIQKNMKIYSKINKNFNVFVRYRNNIAHLNSIKNATKYVNDIGTFTSYFQLYHYIMQCDLKDWVKKEVEEKKISDKYYNYLEKYYKNNNIYLKDFVKAINVPFAYNYSRFKNLSIDKLFDKNDPRKKKWIVIFNF

SEQ ID NO: 215 - DNA, 36 bp, Artificial Sequence
  Direct repeat
gaactacacccttgttaaataacatgggtctaaaac

SEQ ID NO: 216 - protein, 951 aa, Artificial Sequence
  530373 GL0023589
MKTEMKNGEVKTSAKKENCSIAKANGLKSTFKLAENTYYMTSFGKNNTADPEKNIVRMNVENIRNTFSATPISERIVDITGETKKTAQVVLPACSDNQLHAKDTIEQMYFGKTYTDNIHIQIAYNIMDMKKIFGVYSNNIIYSINNLLEEREGSDFLGVFYTENSYQAMNFADAIIKSKLLTKNSKYLNLDMNNVWFNKEVSELSSFRKYVYSRSYANKTSTAKKICICLQEDFHFFDYATVKKAADQFTLLKRIQRSNYFFDMLCDSAGNYQCKNAQILLSILGNLRQESFHENRSTSAWMFNLEKVLTPERKKLLTALIDSRTNHINNHFIENSNKNLNAIFRLFPEKSQADLIVEYYDFSVRKAYKNLGFSVKLLREMLLKTQQELSPLNDKAYDSIRSKLYTMFDFVLYKLYVDNEEQIDQFVRKLRASTSNVEKEALYQQESERTWNEIRGQIIDNVIPFIDSIQKQENEDKLTKRIDQSIIDKAVPHFVNSRDLSYFAKVVYVVASFLDSKEINMFFDALINELENIASFNDVLEQLDMPLDYQEKYRFFERSREEAAGLRFIKSIAKMNKTRVAVKNDTKTVKLKQYCDAGAVLGEINAEKIKAAFGLGDKFNTEEARVDHTFRNFIINNVINSNRFNYVMRFMNPKSARRIMQCESLVAFSLKDIPDTQIERYCKSVNIPFDSANPNYAHMKEQLTYKLLQVQFCNFSKVSNSSHQAVEKERLKALVGLYLSVLYRIVKSIVRINTSYTIAFAAYERDCVILNRKMGKNLYGLKTDPMGITNDFMHMPTVAPSNPHNDFINETKLSKRVCALVNKNRTLCTNRTYQVYRNIIMHLNAVSAFPQYLEGLKVVHSYFDLYHYTVMMLLHRQNEKEKKRNEKEKKQNEKENNMILSTAALEKYDMVRKYQSANKDFIYAINSPLAYNAARYINLSCRTKFEEGFGK

SEQ ID NO: 217 - DNA, 36 bp, Artificial Sequence
  Direct repeat
acttaaatccccctgtaaatgcgggggttctaaaac

SEQ ID NO: 218 - protein, 928 aa, Artificial Sequence
  BMZ-11B GL0037771
MSKDKKTKAKRMGVKALLAHGEDKLTMTTFGKGNRSKIEFTEGYHGRALETPKHFGKRGFEVRKIDENVDLYGDLEEGKTIEALLINPSEKVGEDYLKLKGTLEKRFFGREFPHDNIRIQLIYNILDIYKILGMNVADILYALGNMQDTELDIDMFGQSLNNPEKAKDVVQRMKPYMGFFGGIFRTQKKEDRKKDSNLSEEEKEEKKKKQEELLQKDLQHNMDVARCISALRHATAHNKPATAHDKQDEYPWFKSSDIYETKIFKAGMWSVIEADYKKKIQDVNKQFFSKNKVNLAILFDLLDVRDVKQKKRISDEFYRFTIRKDGKNLGMNLVKIREIIIDRYASGLRDKKHDPHRQKINVIADFLIFRALSQNQGIIDKTVSSLRLTKDEEEKDHVYQNAAELVWGMVSNCLTPYFNDPKNKYILKYKDAKTPGDFEDWITSKISEDDGEPFVKVLSFLCNFLEGKEINELLTAYIHKFECIQDFLNVISSLGENVQFQPRFALFNNASFAQNVAVQLRILASIGKMKPDLTEAKRPLYKAAIRMLCPPEKWEKYTSDEWLEKNMLLNSEDRKNDKKKKQVNPFRNFIAGNVIESRRFMYLVRYSKPKAVRAIMQNRSIVNYVLHRLPSEQIKTYSRVFPEDFSDTEAEIDFLVNKLSEFSFETFISNQQTILNNSKRGFSPNRRETAEEIERLKAITGLYLSVAYIAIKNIVKANARYYIAFAVFERDKELVKAKDARIQTTIPNTKFTNYFCLTQYYLDRDEEKKFPGDPRDKEAFFEHLRKTKRHFSKQWREWLNEKIADAKSSQATGLLLREARNDVEHLNVLRAIPDYIQDFRHGEKGETAMNSYFELYHYLMQRLMLKNTELDLSHWSGWIMRSGRPDRDLIQIAFVSLAYNLPRYRNLTKEHHFDDTVLQKIREKESLD

SEQ ID NO: 219 - DNA, 36 bp, Artificial Sequence
  Direct repeat
ggtcaacagtgtggggaattacccgcactctacaac

SEQ ID NO: 220 - protein, 940 aa, Artificial Sequence
  BMZ-11B GL0037915
MAEHSKKTAAKRVGIKSVIAHDGGKLAVTTFGKKSAAKLAYRDGDQTPFDEEKKSELGGFNVTGVDENTVDAERGIPGEGLIEASVANPVNDLIDESRKEYGQDYLMLKDQLEKVFFGQTFPGDNLRIQIIYNILDMQKAFGLYVNDVLYAVNNLQNTGRLLTDDDWTSDVIGLALGKGRGKEIIESMSDALGFFGSAFKPIPKKPGDKTSGKYAGGKLKERDAAIAEDVAVLRVLCGLRQISAHFRSEKKGESLWASDLGVEKYFKNEMSVVDANYKARAKKIDANFMATSRANLVLLFRILNAKTKEEKEKIAVDYYKFAIRKEGKNLGVNLKKAREILLDKHYPDAKNKQFDSYRGKLYTITDFIIYRMAAEDGAFLEESVQKLRSTPSEEEKEKVYDVLAETIWNATKDDVKKVFDIRQQDIKNAAAQSLDDVNLDSVTVEKEKEFPVVKLLAFLCNFLDGKEINELLSTFVNRLENVQALIDLAKNLGETVNFSKNYAVFNDCGSGAAGRIAERLRLLASIGKMDAGLDSLKPLFIRFAIQILGGARISDEDVDAYIKENILVRKDDPEKKRSNTFRNFITNNVIKSRRFVYLVRYTKADAVRAVMKNGKIVRYVLARIPETQVDSYYKSVVDSSDAGNGKPIKEKIKALAEKLGEFSFDLIAENRDGIIDNAKLDEEKKNVEIERLKAVTGLYLTVAFIAIKNLVKANARYYIAYSAFERDSELLKEKLGEEEFYKLCIEFKNKKGETGYNNAFALLKYYIDRDEDIWRKEEATHRGRDENGKLDYDPDPRRKHYPKRRWLNILKDNLAEMERIDPTGMLAAQMRNDAMHLNAMFKIAKFVGDFRKGSSHEMRSYFELFHFLEQKTLLDSKEDFVQGMRESYGDRIRVEPCVDLIKYLYITLGYSLPRYKTMTVSGLFDPDSEDAKERAKGKRA

SEQ ID NO: 221 - DNA, 36 bp, Artificial Sequence; identical to SEQ ID NO: 219
  Direct repeat

SEQ ID NO: 222 - protein, 923 aa, Artificial Sequence
  BMZ-11B GL0069617
MPHNKKSTIKRIGVKSAFSHGNSRLTITQFGRGNTADIAVETDSRGRSLSLPHRVEKSFTVNKIDDEIDVQRSSLLGTLLNPAENDPVDYLGLKSTLEKEFFGQEFPNDSIRIQIIHNILDIQKILGIYINDVLYSIANLQNVETVEDCLGQSLSKGQDEKLKKILNSITPYLGFLGAGFKQSERPKHQKNSRPDPRQKIEDPNWAYNKSALRILSTLRNKLAHFEDSSILFCDNLKGQFLGSNGNWITIETHYDEMITRINESFFNNSRMNLKILYLVLNAATLEDKKKITEEYYRFSILKEGKNLGVNMRKLREMMVDMFYSEIKDKQYDSYRQKIYTILDFLLFREIKDSEELETMVADLRESESDEKKEELYHDYAELFWDGVKDLIVPFFAAFDGDFTVFTTEKVPADTSKEPFLSSANTEPLVKLLAFLCNFWDGKEVNEVLSAYIHKFESIQAFIDVLESKELNEKVVFSAKKGRNFSAFNEHGFAGRVADQLRVLASIGKMKPDLEGAKRALFRDAVETLGIVENSNWLNEDGTISNDWLETYVLPGDKVTEEEKRAIKPFRNFIANNVIESRRFMYLARYAKPKSVRELMKHEEIIRYVLTRLPEKQIDTYFSNISEGDESEISRKIDTLTKALTGFSFNSLFINRDKIVENTKLDTSNKNVKIERLKALTGLYLTVAFVAVKNLVKANARYFIAFSAFERDYGFMKSHDPDVAQSCLAYEEIMDGKSKTKYNEIYALTEYYLKKEEENDYHPEPGQPFDKEACRKHLDSIRRHFTKKWRDIFRKEIDEAVKIHFTGYLGVWARNQSAHLNVLTQALPQFIGQFARNSKTGKTARMTSYFQLYHYLLQRLLCEDLNFDVPEEWKNKIQETGLPCNDLIHICFVPLGYNLPRYKNLTIECLFDEDSVSAKEGKKA

SEQ ID NO: 223 - DNA, 36 bp, Artificial Sequence
  Direct repeat
atacagcagccctacagattcgtagggttctgtgac

SEQ ID NO: 224 - protein, 993 aa, Artificial Sequence
  DLF014 GL0011914
MAKKKNAKQRREEEKNRLKAKIEKFKIKYAEQETVDKITEEIAQSDKIMRTESILVQHTKKSLAKASGVKSVFIKDDEVIMTSFGRGNDAVVEKIIKDNNVDEKNTKPAYEIVDIEKNGDLIKVQSRRCKNIESANTELPPEKIGMDLIRCKDKLEEIYFGRTFNDNIHIQLIYNILDIEKILSVYINNAVYALGNLERKENDKEKDLVGYLSARAGYNKVINKAINDEKIKDRIEDLKEFIENGNRLGYFGDIFFKKEEVSKNGKKPKKVEVLKSEKEIFDILALLGSLRQFCFHYDEAVFENEDGVIDKEYNDNSWLYNLEKLEPEFKDTLDYFYNRKINDINKGFIKTNQINLHIICDELGLNWDKEQVVGDYYDFLIAKKYKNIGFSIKKIREHMFDIYEAFDIKDKRFDSVRSIMYKIIDFVIYYSFIHYKQDEVDEIVNYLRSTLSEEQKKEKYIKLAGNIWAEYKTQFNKLKDILLANIKEFSDAKEDDVYYEEFKNFKFNEVGKEKLGENAEYFCKLMYLLTLFLDGKEINDLLTTLINKFDNIRSFVELMKEENIECIFDKKFAFFDESKNVCSTLREINSFARMQKPLNNVSVKREMYKDAIKILLKDTRAEEQNIDRILNEYIPSKEDKGIKKDFRNFIIKNIIKSNRFMYLVKYSNPTDVRNLASNRNVVKFVLNAIPDTQIDRYYKSCIQHYSNEVDKETQIQELTDIITGIDYLDFLDVRQSYRNEDKSKKQAVVTLYLTILYILTKNLVNVNSRYVIALHCLERDSKLYGYTKLSKKNNKKLEKIKPPKYHELTKYFIDNRYFDRKKKNKKYGEYTSKKISTYIETNMKNFIGCEQFRTPERYRDTQIDMFVKYRNSIAHLNAVRKASKYINDIRGFDTYFELYHYIMQRDLKDILEKIAEGAAKETEEGQKQDELLKTYFDNLDKYGTYVKDFVKALNIPFAYNYPRYKNLSIDELFDKNNTRKTIKIQDKKLEERT

SEQ ID NO: 225 - DNA, 36 bp, Artificial Sequence
  Direct repeat
gaactactacctcacagatttgtggggttcagaaac

SEQ ID NO: 226 - protein, 924 aa, Artificial Sequence
  EYZ-362B GL0088915
MKKKLNIREQREAKKAAAKQIYAAKASAAQKKADETVVAAQPAGDTANSKPIKSRNKAAGLKSTFVVGDSLYMTSFGKGNLSVPEYRVDTGDAYRVDPISEHSELHVLGADDLAVSFSGTRRMKDVSELKADNPLHSGKNNLVPKNGTDILGLKGILEQRYYGRNFDDNVHIQIIYNILDIEKNLAIYVTNVVAALDHMCDETLDTEHEDFIGYMNTMNSFDVFMHPSQSSRADIYKKINDSRRRFENLLRTKRLGYFGFAYNPKDRNQKKRLYYLMSMIGQLRQFAFHKDSPFNRVWLYQLDEKLSKEHKDTLNYFFDQRYDEIHENFNKTNKVNLELLAEAFPSEDYATLANQYYDFTVFKAHKNLGFSIKKLREKLIENALRDEKIDSFRSKLYRLIDFCLFRIYLKDPDRAEKNVRFLRSCINEQEKEQFYTQEANALKSENPGLVNDFCMQLKDRYSSGSNSTENAEKKEDFPVFPHCHDKQKVSNVSLFAKLMYAFCLFLDGKEINELLSALLNKFDTIACMTKCTKDLGIYAPFSKDFNFFEDSEQRAEEMNLVKSIARMTKPDIQAKEQLFRDALDILGVEVGVSEEALQKEIHQYFQKGAKHDFRNFIINNVINSTRFIYVIKFCNPKTAGQIIRNENILRFVLQRMPQEQIERYYHACTKNPSLCTHDEKIQCLSNIIMEVRYKKFCNVAQKSRDTTKQMEKERFKAIIRLYLTAIYLVVKNLVNVNARYVLAFHCLERDADLFGLQIKQTLPDRKKKSDYLKLAVDQCGDNPENKPKGYLARNKRLCQCVREDIDNAKHLNGDITDYRNCVAHLNVVRNCDQYLENIDTVHSYFSLYQYLVQHYLLKRFEKDKYRCKDDLAIHYYSQVKQYRSYVKDLVKALNAPFGYNIPRFKNLTVEQLFDRNADPETITA

SEQ ID NO: 227 - DNA, 36 bp, Artificial Sequence
  Direct repeat 1
gaactatagtagtgtgaatttacactactctaaaac

SEQ ID NO: 228 - DNA, 36 bp, Artificial Sequence; identical to SEQ ID NO: 130
  Direct repeat 2

SEQ ID NO: 229 - protein, 1054 aa, Artificial Sequence
  Ga0099364 10024192
MSQSTKTKAKRMGVKSVLAHGKDEKGHIKLAITAFGKGNKAELAIQTDEKGSNLAKTYKERNITANKIVSEGIQTSGTIAGEGHATFLNNPAEHVGTDYLKLKETLEMEFFGKSFPGDSVRIQIIHQILDIQKLLGIYITDIIYCINNLRDETHLDHESDIVGLSMSNTNVNLALNQMRPYFGFFGEAFRPVGDDKVKEITLSDEVRKNIEKIIALEEQKRNPSTPRFKQENINLEIENAMGKFKSKDAFETAKKKYNRIVADETNAKTLRILGAMRQITAHFKDQATLFMSDVELPKILKKEFSKADWQTVEDYYAKLVDRINEGFCKNAATNVHFLTELLPEESKKQLTEDYFRFAILKEGKNLGVNMKRLREVMFALFVPELTAPETKKRYDSYRAKIYGLTDFLLFKHIHNTKQLEEWVAVLRETSNEDAKENLYDEFARTAWNTVGDSAKQLIENMQSYFTKKEKEITKTAQPVLSTSSIAHTSKKITQFSSFAKLLAFLCNFWEGKEINELLSAYIHKFENIQEFINLLEKLEGKKPQFTENYALFNEAAGQRAGEIAQNLRILASIGKMKPDLGDAKRQLYKAAIEMLGIDTEEYISDEWLEPNMLLAQPPKEPKKDNEKYRKEPHKYSYEKDMETYRKKLREYEETWRSLIDYEYLMPETNPFRNFVAKQVIESRRFMYLVRYTKPKTVRALMSNRAIVHYVLSRIADIQDHHMTESQIDRYYQNLPQYNEQQHKNVSLETKIDALADYLCKYTFEKNVLKQKNGIVLNTKSATKNVEIEHLKALTGLYLTVAYIAVKNLVKANARYYIAFSIFERDYALFEKKLGKDTLEKYVKPFKYIDKGEEKEGKNNFFALTEYLLDKDNSLRYQWNNDLSDEENKQALRKHLDKKEIRSQRHFSQYWLDIFARQIENAKKTSESGYLLTAARNCALHLNVLTALPEFVGEFRKTGDKMTSYFELYHFLLQKLMLAEAGLNLDEYRERIDTYQTACKDLINITYVSLGYNLPRYKNLTCEPLFDEESATGKERQTRLDEKSKEKKQRKGGQK

SEQ ID NO: 230 - DNA, 36 bp, Artificial Sequence
  Direct repeat
gtgcagtagccttacagattcgtagggttctgagac

SEQ ID NO: 231 - protein, 971 aa, Artificial Sequence
  Ga0187910 10006931
MIEKKKSYAKGMGLKSTLVSDSKVYMTSFGNGNDARLEKVVENNAISCLVDKKEAFVAEITDKNAGYKIINKKFGHPKGYDVVANNPLYTGPVQQDMLGLKETLEKRYFGSSVSGNDNICIQVIHNILDIEKILAEYITNAAYAVNNIAGLDKDIIGFGKFSTVYTFDEFAEPDRHKERFIKDGKLDTKLINQLKNQYDEFDAFLDDTRFGYFGKAFFCKEGDKYLNKQDNERYHILALLSGLRNWVVHNNEVESKIDRKWLYNLDKNLDKEYITTLDYMYSDIADELTKSFSKNSAANVNYIAEILNIDSKTFAEQYFRFSIMKEQKNLGFTLTKLRECMLDREELSDIRDNHKVFDSIRSKLYTMMDFVIYRYYIEEAKKIENENKTLSDDKKKLSEKDIFIISLRGSFSEEQKDKLYSDEAERLWAKLGKLMLEIKKFRGQMTRDYKKSDTPTLNRILPESEDVSTFSKLMYALTMFLDGKEINELLTTLINKFDNIQSMLKIMPLIGVNAKFSSDYAFFNNSEKIADELKLIKSFARMGEPVANAKRDMMIDAIKILGTDLDDNEIKKLADSFFKDSNGKLLHKGKHGMRNFIINNVVNNKRFHYIIRYGDPAHLHEIAKNEVVVRFVLGRIADIQKKQGKGGKNQIDRYYEICIGNGYGKSVSEKIDALTKVIINMNYDQFEAKRKVIENTGRDNAEREKYKKIISLYLTVIYQILKNLVNVNSRYVIGFHCVERDAQLYKEKGYDINTNNLESKGFTSVTKLCVGIADDDPVKYKNVEIELKERALASFDALEKENPELYEKYNMYSEKQKEAELEKQINREKAKTALNAHLRNTKWNVIIRENIRNTEKDACKQFRNKADHLEVARYAYKYINDISEVNSYFQLYHYIMQRIIIDSSGNNANGMIKKYYESVISDKKYNDRLLKLLCVPFGYCIPRFKNLSIEALFDKNEAAKYDKIKKKVAVR

SEQ ID NO: 232 - DNA, 36 bp, Artificial Sequence
  Direct repeat
catgtaaacccctaacaaatggtaggggtttgaaac

SEQ ID NO: 233 - protein, 1105 aa, Artificial Sequence
  Ga0187910 10015336
MENVKNPKEIVKGAKVRFEIYENPKPKKQNQRFSAINVEVITDETHKEAKIQKNEFKTFDQFTKELQETQKVNGETKKEHITKNKHTNVKAAGVKSVFAVDDGNVLITSFGRGNAADIETLKSDDDKTINLTETENQKKYVVTNKRSNVKGLADNPTKVESIIPGETQIGFKSILEKHFFGRTFNDNIHIQIIHNILDIKKILAVHTNNIVYALDNIHERGRENSAEKPIDMIGAGGISTSKEYEQYCSEKSDYEDNFLKQLINNERIAYFGNAFFKDEGNKKVMRTEKEIYYILGMLNEVRNVSTHFTEEDNRDWAKANLYNLSNRLKVGSKEVLNQLYKEKIDKIDANGFVNKGCKRDFSILFKSLNLTTDKDKGELVVGFYDFSIRKNYKNIGFSIKTLREYMLKISNSTLCADTISNNAIRPKAYKLYDFIIWHYYMNKPDKINDFVEKLRTQNKNDEKIKLYYDEAVCLLSELGREIHTMTSCVHNIENTSYEITDKKQKEYYKMQINSLNSADKVSDFSKVIYLVTLFLDGKEINDLLTTLINKFDNIASLLSVLEKQSGKKVEFVENYSFFNSSNLLKEKTLNKSENYTCKIVEELREINSFARMTGDCKIRKSAFEDASQLLGYHDKTVNNLFEVLRLKELESKDWKKRTDDEQQEYDRLLNKHHYFKSGKKLPDTGLRNFIINNVIESRRFNYIVRYADPKKIRKCTENNELLKFAFKDVPDSQVDRYYNICVTNKITNATREEKIERLVDIIKSMNLSKVATVKQRDKQDNVEKQKQLAIMSLYLNILYQIAKNLVYVNSRYVMAFHSLERDSQMLFDAYYDVKRGYCDLSTVLLFGVDDLQNRNRGSYKYLRDNRRSNKDVIETFGDFKGKVSKVVEKKNQGLTNEIYDSLCNVAGTTKTEVQNEIKSILKSNGLDESASSYLSHKLVNKVHSYKYLKQNLDCADNTMINQFRNNVAHLNTIRNMDGIENVTGITSYFQIYHYLMQKALYKEFKKCRENAVRKWIPYITENAEPKYVYWNKKEQQEVEVSFNPKIFGYMENIKNHSNTYCKDFVKALCAPFAYNLPRFKNLSIEELFDMHELSEEPKESMKLTD

SEQ ID NO: 234 - DNA, 36 bp, Artificial Sequence
  Direct repeat
gaacgacgtcactacacaccgagaggtgtctaaaac

SEQ ID NO: 235 - protein, 927 aa, Artificial Sequence
  Ga0187910 10040531
MAKKKKAKQRREEQEAARMNKIQSAVKAKAETAPAVSSAFVEKRKDKQSKKTFAKASGLKSTLAVDNSAVMTVFGRGNEAKLDHRINADLQSESLHPQAALKNVHAPNKQKIHFIGRMQDMNLTADHPLHSHDGERAVGADLLCAKDKLEQLYFGRTFNDNIHIQLIYQILDIQKILALHANNIIFALDNLLHKKNDELSDDFVGMGRMRATIGYDAFRNSTNQKVQETYREFQEFVRRKELLYFGSAFYNGDTRRDEKVIYHILSLAASVRQFCFHNDYTSDDGKGFIKADWMYRLEEALPAEYKDTLDALYLEGVEGLDQSFLKNNTVNIQILCSIFNHDDPNKIAEEYYGFLMTKEYKNMGFSIKKLRECMLELPELSGYKEDQYNSVRSKLYKLFDFIIAHYFRKHPEKGEEMVDCLRLCMTEDEKDSHYEGTAKKLVRELAYDMQEAAEQANGSNITQMQKNEQQGKTKGMFAIRDEIRVSRKPVSYFSKVIYVMTLLLDGKEINDLLTTLINKFENIVSFEDVLRQLNVDCTFKPEFAFFGYDRCRNISGELRLINSFARMQKPSAKAKHVMYRDALRILGLDNGMSEEALDQEVRRILQIGADGKPIKNANKGFRNFIASNVIESSRFRYLVRYNNPHKTRMIAQNEAIVRFVLSEIPDEQIRRYYDVCRDPKLPRSSSREAQVDILTGIITDVNYRIFEDVPQSKKINKDRPDANDRMTLKKQRYQAIVSLYLTVMYLVTKNLVYVNSRYVMAFHALERDAYLYGITNIKGDYRKLTDNLLADENYKKFGHFKNKKWRGIAEQNLRNSDVPVIKSFRNMAAHISVIRNIDLYIGDIQKVDSYFALYHFLMQKLIQRVVPENTKGLSDQTKKYYDALEQYNTYCKDFVKAYCTPFAYVTPRYKNLTIDGLFDRNRPGEDK

SEQ ID NO: 236 - DNA, 36 bp, Artificial Sequence
  Direct repeat
caactactaccctgccaaatggcagggttcagaaac

SEQ ID NO: 237 - protein, 900 aa, Artificial Sequence
  Ga0187911 10069260
MSTKKRFRYSVAAKAAGLKSSLAVDTDRTVMTSFGHGNAAILEKEIVDGEISVLNIENPAFDAVINDKKYALTGHHAGVHALVDQPQNRSDAVHIRGALEKKYFGDTFADNIHVQIAYNILDITKILTVYANNVVYALNNLVHADDDTQADELDSLGNFSAGTSYAKSKSKSKSKQQDFVELFIKKKEIHGYFGDTFAFLDKRIADADKEKQVYAMLACLGSLRQACSHYRIRYSVNGKNVDADADTWLFSSAQLDQTDPLFSEMLNRIYSHKIKTVNQNFFENNRKANFPILKKMYPETTLKVLMNEYYDFSIRKGYKNFGFSIKSLREALLSPQYESLIGVQIKDNKEYDTVRSKLYQLFDFALTRYFNQHPDMVDAFVVELRSLAKDEDAKNAVYEKYAKAVWNDVKQPIAVMLSYMNGSAIKNIKAFELKPDQKELNGIMNSNALDVPHFCKLVYFLTRFLDGKEINDLLTTLVNKFDNIHSFNQVLTALGLSASYEADYKIFEDSGRVVEYLREINSFARMTVDMEKIKRSAYKKALLILGSSKYSDEDLDARVDEMLGVDYNQNGEKIKVRVDTGFRNFIANNVVESSRFHYLIRYCHPRKIRNLAGNAALIEYQLRRLPELQILRYYEACTEPIKRTARTMDEKIGTLIDLIVKMDFSQFEDVQQNDRVRVFSDAEKKEKIRKMREKQRYQSIISLYLTMLYLIVKNLVNINARYVMAFQAWERDNYLLLQLSGKEAEAEYLNLTRHFIEPLDGAKPYLKKRPVEYLKKDMAMVGNSSIRHFRNATVHLNVIMEAHRYTKDIKYIGSYYALYHYILQRHLLDKIEEDSYAEKTVSEKLWESQISQYGTYSKDFVKALCCPFGYNLPRFKNLSIEQLFDRNESKEITDATAPRQ

SEQ ID NO: 238 - DNA, 36 bp, Artificial Sequence
  Direct repeat
gaactacagccctgtgaaataacggggttctaaaac

SEQ ID NO: 239 - protein, 991 aa, Artificial Sequence
  MH0288 GL0082219
MKKMTAKERREQEKQKRAEVIRGKQEANRKKAQAAATQDATAPVHHKNAKSLAKAAGLKSTFTLPTGELLMTSFGRGSEALIQKRIMKDVISDVQEGDPAFSVIPMPKQFEIQGRAIDVQKEGSSVPEVLTDDPRASQKPAGADLIGAKPALEKRYFGKTFTDNIHIQLIYRILDIKKVLAIHANNIVYTLDNLSRREGTEGTDFIGIGGLTLKNSYAAYCEPRTFFDEGKEKNIIENIEKSHGEFLEYMKNPRLAYYGEAFYRRLSNNERSKLGMERYERMSDAQRDAFDRKYPIDFCDGELHFREIEKLAPEYVRKSEKEIYYILAMLSELRQCVFHDSAASRSWLYNLEKVLPAEAMQVLDGVYSQKVAALNNFSKTSSKSNFRLLFNALHADTDAQKKQIAEDFYKFSVRKTYKNIGFSIKLLRESMLDTFAPEYKEKSYDSVRGKLYQLVDFLIWNIYDKNEKMADALVAQLRAEVKRDRDEKSPVYDREAARLWTMIREAVAQTAKTLRAVTLSNNTPGSIKIKELALSKYDRDLVENAIDSAVDERGRRLKITDEASYFSKLIYLLTLFLDGKEINDLITTLVNSFDEIDSFCCVLQKAKLDRGFTEGYRFFAHSAEISQELRAINSFARMTTETVQGKPCMFEDAADLLGMDTDLEEVREALEAFYNKEKMSLKWTKDGQEADTGFRNFIISNVLKSSRFRYVVRYGNPKKLREVMQNEAVVKFVLNDLPEEQINRYSENILGLDAAAKEKKVSELARFLRALSLEDFRDVEQSANAARNARKARYQGAMSLYLNVIYQIIKNMVYINSRYTLAFAKYEHDASLLLDNWVYDPYKTVFSDLTEDSLQKGKLNRRAAKYLQTNLEHSDNTLIRQYRNSVAHLNAVRNMNLYIGDLREITSYFGIYHYIMQRDLITRCQKVKMKNPVVVGYFDKVRTYRTCCKDLVKALNITFGYNLPRYKNLSIEGLFDKNRPGDKKESALIAE

SEQ ID NO: 240 - DNA, 36 bp, Artificial Sequence; identical to SEQ ID NO: 203
  Direct repeat

SEQ ID NO: 241 - protein, 925 aa, Artificial Sequence
  O2.UC29-0 GL0096317
MERQKRRKKSCAKMAGVKSTFVIDSDLLMTSFGERDKAVREKYIAQGNVKSLRKQEQAFDAQYGKEKIFVTNADNKLHVAINNPLCGNKKQSPEAQEYSRRVLEHKKAINQKYETIVFGKPSNDNIHIQVVSKIMDIEKTFSFVMGNIVYAINNLDPEQNIDNPIDYMSNKARTDENLKRVLRRCMYLFDLGFEYAEPSPYKKSEQQIEQEREEREKENLETLKKALDVISVMRTDSFHGYDMCNSTSAIVKFPSKKFNLDQKGKNLIYRNAFKYKTDTIKKQYAQNSKVNINFLSYVLYGNGCTEEQKKELSREYFNFAILKQYKNLGFSITSLREQLLSLYDIDFECKRNLRSRANSFCDYVLYYRYAVQFPERIVDLVDKLRCSANEKEKTNVYIEEANRIKEDLRIAFNRINNFDAKSIKLYSTKNNVDDQPMLPFEQVSKDIKGGDAAREKADAFCDMTYYLTQFLDGKEINVFLTTLHNLFENIASFLDVMHKQNISYDFTEQYVMFYDSAYIVKKLETVISVSRMKKALDFYNGQALRDAIRVLGISERHVDMDMKEYVDKYLFDDCKDVKHADHNLRNFIVTNVIKSRKFNYLARYSDMATVSKLSKNKEVVKFVLKRVDPKQIERYYRSVCDVRNISAEDEIEKLVDIIYNFNIDELEQVNNAEIGTGHSGRKVASKRSVQERNQARACVSLYLNVLYQIVKNLMNVNSRYSIAFAMTERDMIVEGKGIEAIETFKDDPDAGKKSKKQIAYRTKYIALTEEYLDKGYIKCATERIKENIKKYGGDPKSIDHIPGEYIKKNLEGYCAGSTNTFRNAVAHLALMARVSEYASDIKNVNSYFSLYHYCMQKHILYCARRFNKQGNEKMAAALNDAEIHRSYSKDAVKFLCLPFAYNLPRYKALTVEGLFDWNEYGQDDD

SEQ ID NO: 242 - DNA, 36 bp, Artificial Sequence
  Direct repeat
gtactaagaccttactaaatggtaaggttccaaaac

SEQ ID NO: 243 - protein, 954 aa, Artificial Sequence
  PIG-014 GL0226364
MTKPEKKQIKQATLTKRMGLKSTLVFDNKITVTSFANSSNSEKASAHIEKRTDFWGKTIMQDEKMFRTDVEKQQIYIEKEFPDENNKIITQTAMFENPALRNCGKDYIGMKNSVEKVMFGKEFPNDNLHIQIAYNILDIKKIICPYINNVVNIFYNLGRGKLKDDKNDLLGKQIGPKSEEMVEDLLKNSSAYFVYFGDVFKQVKLSKEQQEKSEEEKRRIWQELWNKNFDHNKNIVNSLIKFRQMCFHQNYENSDKEVSSTALFNIEQFLNKEEKASLDEIYTGAIDKVNCDFNKNSSNNLYILEQIYCNDKNLGQRYYDFVVKKSQCNLGLDTKLIRELLIRKLSDEGLDINDSRYDTYRNKIYTVFGFILYYELTKNETFCQEIVAKLRRFGGDEIEKNKIYNEYFLRKEAVYNQIAEKFKQSVCWFKKEKEKKKEFSSKTKIDLRSVQKIEDQNASVFAKMVYLISRFLDGKEINELCTKLLNKFKNINELVETAKRCGETIEFCPEYKMFKNSAKLAEEMRFVQSVSKMKKLTKKEDKSIKPQVIDDALELLGLKIEKYKKDDQGNFVLDDQNHNVWTDEYKSYRKECFTPKNSDSMNDAEKSFVAKGHQKRNFIISNVVLNKRFLYVAKYGSPTACNQMMKNQKIVRMALESISEDQLRKYARRVYDNKEHFQNQTADEIRENLAKKLKNFNIGAELKTVGNLSEKDFRSSKNALKDKSKSLIGLYLTVAYLITKNMIKINTRFSIAFGAYERDMEFLLQQKKEKGKRFDWLALTQKFLSEDKNYYFEHDLRRKEINKISDRDERKKQHRENDKYYDSCMHFSRHSFEYISKNFAEVQSHPDPLKLFIKYRNNVMHLNIIRDLNDYLPDFKRGKAFEKTDTFYDLYCYCLQKMLLSEVDGFSAINENIDKYCTASKDFMNLLNIIFAYNVPRYKNLSNKELFYRLDSEQ

SEQ ID NO: 244 - DNA, 36 bp, Artificial Sequence
  Direct repeat
gtacaaaagccctccagtttggacgggttctaagac

SEQ ID NO: 245 - protein, 941 aa, Artificial Sequence
  PIG-018 GL0023397
MAKKLSPRELREQRERERQAKFAKQVQEREAEKAKREKQVSVSDTVGAAAAVQNENGKKSMAKAAGVKSVFAVGDTVYMTSFGRGNDAVLEKKIVDESHESLNKANPAYEITDISSVNYSVEGHRGQSVCATADNPLHHDGGSSVPTDMLCLKPTLERVYFGKTFDDNLHIQLIYNILDIEKILAIYSTNAVYALNNMIADEDDESSDLFQNMTTDYTYDKFRGRSERIVKSFNDFVSNPRLAYYSDAFYEKKGKGSKRRSEKEIYSMLAMLGKLRHWCVHSESGEAEFWLYKLDSLNGEFIDVLNTLYNRSVNEINRGFVDTNKVNIQILQAVCKNMDLISLIKAYYEFLITKKYKNMGFSIKKLREMMLAETAYTSNPDDRLYDKEINSVRNKLYQMTDFIIYLEYRDNKSIIDTLVSKLRSSVTDEAKEAVYREEAANLRGRLLDAVALIAKSLNGVNIKKLQQNTLEIPDSKLENCFIKSAEKVSAFTKLNYLLTRFINGKEINDLLTTLINKFDNIRSFLETMDELGLERTFTENYRFFEDSQKYRDELIELNSFAKSCSFDISAKRIMYRDALDILGIQAELSEDEIGRMIDNILQLDANGERISKNQRENGLRNFIASNVIDSNRFKYLVRYGNPKKIRETAKCPPAVKFVLDGIPDSQIERYYNSCFPEDTAICSADKKRRELAEMISNISFDWFKDAGNVQRVNAEDKSRNAEIKRKNQAIIRLYLTVMYLMLKNLVNVNSRYVIGFHCVERDAKLYKLSGLTIEGNTDKNRTLLTATILGITSADRAPSGEIVADCDLGRAETAANRHLRKKRWYVQIFNNLKQADRNVINEFRNSVCHLNAIRNINTNIEGIGFVKNYFALYHYLIQRHISSKRISFNSFSAEYISNLEKYHTPSEYFIKAYCTPFAYNLVRYKNLTIDGLFDRNAPSEK

SEQ ID NO: 246 - DNA, 36 bp, Artificial Sequence
  Direct repeat
gaactacacccctgttaaattgcaggggtctaaaac

SEQ ID NO: 247 - protein, 948 aa, Artificial Sequence
  PIG-025 GL0099734
MAKKMNAKEQRAAIQAEKNKKIQMANAAREKQAEEARLKAEAERIEKEENKKREAELKRFKLDQETRGKLPKNERKSLAKAAGLKSTFAVGTDLYMTSFGKGNDAIVEKKISNKQVTQINTEKENFTVDTDGITDTIVPVQSKRIACLNTQADNPLYRKDSENQVQPDKLLLKDTLEKVYFGKTFNDTLHIQLIYNILDIQKILTVYSVNTVYTLNNLFGKEISERGDFIGALSFQQTYDDYTSDSKNKEIFEDFYSKRSLGYYGHIFFKDKKKRSKREIYDILALIATIRQWCIHSEEDKKTWIYNAENVLDSEYLDILDDVYGGLVEKINKNFIKDNKVNLILLSDILDMKSKDDFEELIRQYYRFIITKEQKLLGFSITKIREAMLEDTVFKTDKKYDSIRSKLYKLIDFMMFYKYTTVDSEKEHADSIVEKLRATLSGESKEEIYKAEANRIWNLYEDIIMNKIEPALDEGVISGLKKNKSYDNMSIEGIVAEETANVSYFSKIIYLLAQFIDGKEVNDLTTTLINKFDNIRSFIDTANQIGLECNLLDEYQFFNTSDTVKKELHVIKNLTGMGYYDVSIKHQMYKDAIDILGLHDNLSDEEINQLIDTNILFIGADGKPVKMAKGKRGFRNFIISNVLKSSRFRYLVKYCNPKKIRKIANNEKIVKFVLGRITETQIERYYYSCNPELKRAAYPGREAAIDDLTKIIINMKFDDFKNVKQSANVEDSSKEAQEKMKYQTIISLYLTVCYHLVKNLVNINARYAMAFHSLERDARLYGIYGSEKDYVEKLKKEQAVLVEKLLSDGPETAGNLHLRSKKWNRLMRVNLENYSAAASQNFRNAVAHLNPIRNADVLIEGIENITSYFDIYHYIVQRSVLNRTNKTPKMKEYEELINKYHTYNKDFVKALCAPFGYNVVRFKALTIYEMFDRNYPEEKRAEEARKSC

SEQ ID NO: 248 - DNA, 36 bp, Artificial Sequence
  Direct repeat
taatatgccctatatcaatttataggggttcagaac

SEQ ID NO: 249 - protein, 894 aa, Artificial Sequence
  PIG-028 GL0185479
MSESDKIKIKSKKTRTKRAGLKSSFVSEGKGLMTAFGKGNNAVIEKRISGDLIENVSNKPRFSVEFGNKEYIINDKKLGIVSDDPRESQKPVGEDGIHCKRALEERYFGKTFNDNIHIQLIYSILDLEKILAVHSNNIVYTFDNLRRKETDEYDDFIGYMSTVNSYEEFISPEKLLPGKEQSVYDNINRSQETFLEYRKNPRLGYFGKVFYEKSTDAKDKNKKKMRLISEKEMYYIFALLGGLRQFCTHDKNRARNWLYSLDTMLNDDAKAVLDKYYVSTVSSLNKHFVENSAKKDFSIIFNALNITDIELKKNIAKEYYEFVCRKNFKNIGFSIKKLREYLLEKPEFRNLKDDKYNSVRSKLYRLIDFIIYLNYKDAKFKNDNDEKIERFVSKLRKCPDEASKETVYQTEADIIKKSISGSINSIKRDMMLVKSKYGKLELDTQTVNQLKRAVDDISINTKGDYFTKLMYLISLLIDGKEINDLLTTLIHQFENIASFIDVMKKENIECEFTEKFAFFKNSEIIAHELRTVNSFARMTGFMENDESTKFIMFREAADILGTSYTDDELTDHLNLKKTRLIARSKADMGLRNFIISNVIKSSRFKYLIRYSNPKKVKAIAENKKLVSFVLDKIPDTQIIRYCNTCGFKVGKRQENINTLAEAITYFSFSNFEKVKQSANVENDTPDAIDKAQKQGLISLYLTVLYLFIKNMVYVNSRYVLAFHCLERDSQLLKITSGYNNLSYNNLTNHFIEKEYLNSHARNYLRVNISNSDEWSIVKFRNGVAHLNSVRNIDTSIKGLREFKSYFEIYAYTVQKSIKNYYDAESPVQINPKTIEYMESVDKYGSYTKDFVKALNTPFGYCLARYKNLSIEPLFDRNTVYNKKDVKEEFAVNSK

SEQ ID NO: 250 - DNA, 36 bp, Artificial Sequence
  Direct repeat
gaactatagccctccgatttcggagggttctgaaac

SEQ ID NO: 251 - protein, 980 aa, Artificial Sequence
  Ga0224422 10645759
MDKYKLLRNQKFDYVIKLDNIDNIRPILCKEIVNKILKKLKLDFFFSTKEKEIHFTADDIITKKYKKIELVGDDKEVFPIYVRLREVPLKGKAKRLGLKSIFVEDNKLILTTIGKKDDVLIEKEILNNSKNEVISHINPENYAVQEVNYKNISLANDKLKADIDNPSHSKVEETISIKKDYLERKDVIEKKFFNNTFNDNIHIQLAYNIMDINKIFNIYSNEVVFTMENLAHSDDAKDFIGGIDYKKDVIQNAKFNDYFASIFNSLRYFSQAFPNKTFDKIKIDGEKDYNREEIKKNTKIILRILSMFRQFSIHGYTDLFDMEKDPKIRDLLDYFTARYDEVYNNLIRNFIKTSKTNIAIVFEALNLPINDNGLKKEILNDYFDFSITKSYVNMGFNFKRLKEVLISKLGLNVSDSNKQATYNVINYLIYRHLKDNPIVDKYVKCLVASEGDLDKIAIYDAFADEIKLPLKNIITQELVDNQKRNQKYKYFNIDGSWLNTNFNNIDPFCKAIYFLTIFLDTKEINMLVTSIVNKLRNINGLVKVLNNKSDLIYDYRIFDKGNAQKIADQLSVVLSIARMQKNFNKKFKSDNKNSANKPSSDMIYDAYCLFGYKESKETFDEELEADTSKPSKGIAKFQNKITSAIVNSNKFRFIIKYANPRNCYSIMKNTRVVSFVLKEIPQSQIDKYIIKKEKYNSLNYDAKINALAKELADVSIYGMRKAYNIRAKVEANNLELPKLFMTIIYQVIKSLVRINTYYNIAFSCLERDKKLFNVPDDYCDYSDLMLLDAFVYGTNEFEVSKDGKCECITIDVPLNKYERKVDGKIISVQGTKLGSSKYSWLKDDIDVFKEIFYMNNKPTEIESCSVIYRACYRNTIAHLNAISNMTSYLASFVGRNNRMNSYFELYQYIIQMNFINKYKDNYSNEFIDKQSEILKKYKTYSKDLLHILNLPLAYNMARYKNLTIEDIFYDKFINYIKKSE

SEQ ID NO: 252 - DNA, 36 bp, Artificial Sequence
  Direct repeat
ggacaataacctgcgaattttggcaggttctatgac

SEQ ID NO: 253 - protein, 996 aa, Artificial Sequence
  ODAI chimera
MLKKCSVCGKKFETNYQGGKPVCRNCRSNKSKPVNPKSSRKPESIDKAIEILTEKLISDCKKNDCASECGKGRRKSKAKAAGLKSALDLGNGQALITSFGKGNEAVPEKRVEGDKIISLREGEAFALAKEPVNHKLVLKSGRIKAEGGPVEFDGPQKNSSMSAVRLDEYNNQIERKFFRGNKVLQDNIRIQIAHNIMDIEKILAVHINNIVYSVNNLFRVQGNEGDDFLGYRGLDKNYSDFCKNKPEDKERFFNFIGKGDGKVTNPRLSYYGAAFAEKVQPTLKYREAEDIYYIICMLGEARQMFAHGNDDRTKTFLYNIVGYRNGTEINSKFTAVLDGIYSKKVEELNGNFIKNSKKDLTILFSAFGCQDEASKKKLIEKYYDFIVKKTNKNMGFSVTKLREKIIEGYRFRGNPVTGTDYDSVRHKLYRTFDFIICSYYDDHAKEKDTLVSSLRASLNDTKKENLYAGEAKTIAESIKDRMDTVCRMYNKGEGIKHITVDRFIAGAGAGKLIDKCSISTECDYFCKFIYLMTLFIDGKEINDLLTTLINKFDNIDSPSVDKAVNNQNRVEFGDKYDMFNKAGEICESLRSINSFARMESPAPAAKRTMFVDAIRMFGFADVSDNDAEKFYKENIEPFIYDRNGDIEDEWKKGKLVHKKDEKKKGVYNFIATNVIESNRFQYLVRYANTEKIAALARNETIVRFVIKKLPAAQIVRYYIACNRIRENINSNVLTSDDMAESLVKLVTGMDFGKIKGVRNDDRSGDKEMKKAIVTLYLTILYHLTKNLVYVNSRYFMAFHCLERDMNLFGEGQKQALRNTGDYPADNADLRRRDIKYCVLTKAHIKQEEVKSRRNDTDSKSQQKAKSRRRRWCLLLKEDIDKLNGCESLRILYRNAVAHLNIPRNAIDYIGGIKKADSYFAIYHYMMQQYLSKKHGLPEGLGCTHGVYCKDLVKALNAPFGYNLPRFKNLSVEALFDMNEEPAPEGKERSKNADGCN

SEQ ID NO: 254 - DNA, 36 bp, Artificial Sequence; identical to SEQ ID NO: 159
  Direct repeat

SEQ ID NO: 255 - protein, 6 aa, Artificial Sequence
  HEPN motif
  misc_feature (2)..(5): Xaa can be any naturally occurring amino acid
RXXXXH

SEQ ID NO: 256 - protein, 11 aa, Artificial Sequence
  N-terminal NLS
SPKKKRKVEAS

SEQ ID NO: 257 - DNA, 33 bp, Artificial Sequence
  N-terminal NLS
agccccaagaagaagagaaaggtggaggccagc

SEQ ID NO: 258 - protein, 11 aa, Artificial Sequence
  C-terminal NLS
GPKKKRKVAAA

SEQ ID NO: 259 - RNA, 20 nt, Artificial Sequence
  dCas9 target
uuaucgucuguuuguggaug

SEQ ID NO: 260 - DNA, 33 bp, Artificial Sequence
  C-terminal NLS
ggacctaagaaaaagaggaaggtggcggccgct

SEQ ID NO: 261 - RNA, 271 nt, Artificial Sequence
  Artificial Eubacterium siraeum nCas1 array targeting ccdB
gaacuacacccgugcaaaaaugcaggggucuaaaacuaacggcucucucuuuuauagguguaaaccgaacuacacccgugcaaaaaugcaggggucuaaaaccuuuaucugacagcagacgugcacuggccagaacuacacccgugcaaaaaugcaggggucuaaaaccaucaugcgccagcuuucauccccgauauggaacuacacccgugcaaaaaugcaggggucuaaaacuaauggcguuuuugaugucauuuucgcgguccgcuga

SEQ ID NO: 262 - RNA, 36 nt, Artificial Sequence
  Artificial Eubacterium siraeum nCas1 array targeting ccdB - full 36 nt direct repeat
gaacuacacccgugcaaaaaugcaggggucuaaaac

SEQ ID NO: 263 - RNA, 30 nt, Artificial Sequence
  Artificial Eubacterium siraeum nCas1 array targeting ccdB - spacer 1
uaacggcucucucuuuuauagguguaaacc

SEQ ID NO: 264 - RNA, 30 nt, Artificial Sequence
  Artificial Eubacterium siraeum nCas1 array targeting ccdB - spacer 2
cuuuaucugacagcagacgugcacuggcca

SEQ ID NO: 265 - RNA, 30 nt, Artificial Sequence
  Artificial Eubacterium siraeum nCas1 array targeting ccdB - spacer 3
caucaugcgccagcuuucauccccgauaug

SEQ ID NO: 266 - RNA, 37 nt, Artificial Sequence
  Artificial Eubacterium siraeum nCas1 array targeting ccdB - spacer 4
uaauggcguuuuugaugucauuuucgcgguccgcuga

SEQ ID NO: 267 - RNA, 268 nt, Artificial Sequence
  Artificial uncultured Ruminoccus sp. nCas1 array targeting ccdB
cuacuacacuggugcaaauuugcacuagucuaaaacuaacggcucucucuuuuauagguguaaacccuacuacacuggugcaaauuugcacuagucuaaaaccuuuaucugacagcagacgugcacuggccacuacuacacuggugcaaauuugcacuagucuaaaaccaucaugcgccagcuuucauccccgauaugcuacuacacuggugcaaauuugcacuagucuaaaacuaauggcguuuuugaugucauuuucgcgguccgc

SEQ ID NO: 268 - RNA, 36 nt, Artificial Sequence
  Artificial uncultured Ruminoccus sp. nCas1 array targeting ccdB - full 36 nt direct repeat
cuacuacacuggugcaaauuugcacuagucuaaaac

SEQ ID NO: 269 - RNA, 30 nt, Artificial Sequence; identical to SEQ ID NO: 263
  Artificial uncultured Ruminoccus sp. nCas1 array targeting ccdB - spacer 1

SEQ ID NO: 270 - RNA, 30 nt, Artificial Sequence; identical to SEQ ID NO: 264
  Arificial uncultured Ruminoccus sp. nCas1 array targeting ccdB - spacer 2

SEQ ID NO: 271 - RNA, 30 nt, Artificial Sequence; identical to SEQ ID NO: 265
  Artificial uncultured Ruminoccus sp. nCas1 array targeting ccdB - spacer 3

SEQ ID NO: 272 - RNA, 37 nt, Artificial Sequence; identical to SEQ ID NO: 266
  Artificial uncultured Ruminoccus sp. nCas1 array targeting ccdB - spacer 4

SEQ ID NO: 273 - RNA, 303 nt, Artificial Sequence
  Target RNA (ccdB sequence)
augcaguuuaagguuuacaccuauaaaagagagagccguuaucgucuguuuguggauguacagagugauauuauugacacgcccgggcgacggauggugaucccccuggccagugcacgucugcugucagauaaagucucccgugaacuuuacccgguggugcauaucggggaugaaagcuggcgcaugaugaccaccgauauggccagugugccggucuccguuaucggggaagaaguggcugaucucagccaccgcgaaaaugacaucaaaaacgccauuaaccugauguuuuggggaaua

SEQ ID NO: 274 - RNA, 30 nt, Artificial Sequence
  Target RNA (ccdB sequence) - spacer 1
gguuuacaccuauaaaagagagagccguua

SEQ ID NO: 275 - RNA, 30 nt, Artificial Sequence
  Target RNA (ccdB sequence) - spacer 2
uggccagugcacgucugcugucagauaaag

SEQ ID NO: 276 - RNA, 30 nt, Artificial Sequence
  Target RNA (ccdB sequence) - spacer 3
cauaucggggaugaaagcuggcgcaugaug

SEQ ID NO: 277 - RNA, 30 nt, Artificial Sequence
  Target RNA (ccdB sequence)
accgcgaaaaugacaucaaaaacgccauua

SEQ ID NO: 278 - protein, 915 aa, Artificial Sequence
  Mutated Cas13d sequence, NLS-Ga 0531(trunc)-NLS-HA
MSPKKKRKVEASKQSKKTFAKASGLKSTLAVDNSAVMTVFGRGNEAKLDHRINADLQSESLHPQAALKNVHAPNKQKIHFIGRMQDMNLTADHPLHSHDGERAVGADLLCAKDKLEQLYFGRTFNDNIHIQLIYQILDIQKILALHANNIIFALDNLLHKKNDELSDDFVGMGRMRATIGYDAFRNSTNQKVQETYREFQEFVRRKELLYFGSAFYNGDTRRDEKVIYHILSLAASVRQFCFHNDYTSDDGKGFIKADWMYRLEEALPAEYKDTLDALYLEGVEGLDQSFLKNNTVNIQILCSIFNHDDPNKIAEEYYGFLMTKEYKNMGFSIKKLRECMLELPELSGYKEDQYNSVRSKLYKLFDFIIAHYFRKHPEKGEEMVDCLRLCMTEDEKDSHYEGTAKKLVRELAYDMQEAAEQANGSNITQMQKNEQQGKTKGMFAIRDEIRVSRKPVSYFSKVIYVMTLLLDGKEINDLLTTLINKFENIVSFEDVLRQLNVDCTFKPEFAFFGYDRCRNISGELRLINSFARMQKPSAKAKHVMYRDALRILGLDNGMSEEALDQEVRRILQIGADGKPIKNANKGFRNFIASNVIESSRFRYLVRYNNPHKTRMIAQNEAIVRFVLSEIPDEQIRRYYDVCRDPKLPRSSSREAQVDILTGIITDVNYRIFEDVPQSKKINKDRPDANDRMTLKKQRYQAIVSLYLTVMYLVTKNLVYVNSRYVMAFHALERDAYLYGITNIKGDYRKLTDNLLADENYKKFGHFKNKKWRGIAEQNLRNSDVPVIKSFRNMAAHISVIRNIDLYIGDIQKVDSYFALYHFLMQKLIQRVVPENTKGLSDQTKKYYDALEQYNTYCKDFVKAYCTPFAYVTPRYKNLTIDGLFDRNRPGEDKGSGPKKKRKVAAAYPYDVPDYA

SEQ ID NO: 279 - protein, 919 aa, Artificial Sequence
  Mutated Cas13d sequence, NES-Ga 0531(trunc)-NES-HA
MLQLPPLERLTLGSGKQSKKTFAKASGLKSTLAVDNSAVMTVFGRGNEAKLDHRINADLQSESLHPQAALKNVHAPNKQKIHFIGRMQDMNLTADHPLHSHDGERAVGADLLCAKDKLEQLYFGRTFNDNIHIQLIYQILDIQKILALHANNIIFALDNLLHKKNDELSDDFVGMGRMRATIGYDAFRNSTNQKVQETYREFQEFVRRKELLYFGSAFYNGDTRRDEKVIYHILSLAASVRQFCFHNDYTSDDGKGFIKADWMYRLEEALPAEYKDTLDALYLEGVEGLDQSFLKNNTVNIQILCSIFNHDDPNKIAEEYYGFLMTKEYKNMGFSIKKLRECMLELPELSGYKEDQYNSVRSKLYKLFDFIIAHYFRKHPEKGEEMVDCLRLCMTEDEKDSHYEGTAKKLVRELAYDMQEAAEQANGSNITQMQKNEQQGKTKGMFAIRDEIRVSRKPVSYFSKVIYVMTLLLDGKEINDLLTTLINKFENIVSFEDVLRQLNVDCTFKPEFAFFGYDRCRNISGELRLINSFARMQKPSAKAKHVMYRDALRILGLDNGMSEEALDQEVRRILQIGADGKPIKNANKGFRNFIASNVIESSRFRYLVRYNNPHKTRMIAQNEAIVRFVLSEIPDEQIRRYYDVCRDPKLPRSSSREAQVDILTGIITDVNYRIFEDVPQSKKINKDRPDANDRMTLKKQRYQAIVSLYLTVMYLVTKNLVYVNSRYVMAFHALERDAYLYGITNIKGDYRKLTDNLLADENYKKFGHFKNKKWRGIAEQNLRNSDVPVIKSFRNMAAHISVIRNIDLYIGDIQKVDSYFALYHFLMQKLIQRVVPENTKGLSDQTKKYYDALEQYNTYCKDFVKAYCTPFAYVTPRYKNLTIDGLFDRNRPGEDKGSGLQLPPLERLTLYPYDVPDYA

SEQ ID NO: 280 - protein, 1000 aa, Artificial Sequence
  Mutated Cas13d sequence, NLS-RfxCas13d-NLS-HA
MSPKKKRKVEASIEKKKSFAKGMGVKSTLVSGSKVYMTTFAEGSDARLEKIVEGDSIRSVNEGEAFSAEMADKNAGYKIGNAKFSHPKGYAVVANNPLYTGPVQQDMLGLKETLEKRYFGESADGNDNICIQVIHNILDIEKILAEYITNAAYAVNNISGLDKDIIGFGKFSTVYTYDEFKDPEHHRAAFNNNDKLINAIKAQYDEFDNFLDNPRLGYFGQAFFSKEGRNYIINYGNECYDILALLSGLRHWVVHNNEEESRISRTWLYNLDKNLDNEYISTLNYLYDRITNELTNSFSKNSAANVNYIAETLGINPAEFAEQYFRFSIMKEQKNLGFNITKLREVMLDRKDMSEIRKNHKVFDSIRTKVYTMMDFVIYRYYIEEDAKVAAANKSLPDNEKSLSEKDIFVINLRGSFNDDQKDALYYDEANRIWRKLENIMHNIKEFRGNKTREYKKKDAPRLPRILPAGRDVSAFSKLMYALTMFLDGKEINDLLTTLINKFDNIQSFLKVMPLIGVNAKFVEEYAFFKDSAKIADELRLIKSFARMGEPIADARRAMYIDAIRILGTNLSYDELKALADTFSLDENGNKLKKGKHGMRNFIINNVISNKRFHYLIRYGDPAHLHEIAKNEAVVKFVLGRIADIQKKQGQNGKNQIDRYYETCIGKDKGKSVSEKVDALTKIITGMNYDQFDKKRSVIEDTGRENAEREKFKKIISLYLTVIYHILKNIVNINARYVIGFHCVERDAQLYKEKGYDINLKKLEEKGFSSVTKLCAGIDETAPDKRKDVEKEMAERAKESIDSLESANPKLYANYIKYSDEKKAEEFTRQINREKAKTALNAYLRNTKWNVIIREDLLRIDNKTCTLFRNKAVHLEVARYVHAYINDIAEVNSYFQLYHYIMQRIIMNERYEKSSGKVSEYFDAVNDEKKYNDRLLKLLCVPFGYCIPRFKNLSIEALFDRNEAAKFDKEKKKVSGNSGSGPKKKRKVAAAYPYDVPDYA

SEQ ID NO: 281 - protein, 980 aa, Artificial Sequence
  Mutated Cas13d sequence, NLS-RfxCas13d(del5)-NLS-HA
MSPKKKRKVEASIEKKKSFAKGMGVKSTLVSGSKVYMTTFAEGSDARLEKIVEGDSIRSVNEGEAFSAEMADKNAGYKIGNAKFSHPKGYAVVANNPLYTGPVQQDMLGLKETLEKRYFGESADGNDNICIQVIHNILDIEKILAEYITNAAYAVNNISGLDKDIIGFGKFSTVYTYDEFKDPEHHRAAFNNNDKLINAIKAQYDEFDNFLDNPRLGYFGQAFFSKEGRNYIINYGNECYDILALLSGLRHWVVHNNEEESRISRTWLYNLDKNLDNEYISTLNYLYDRITNELTNSFSKNSAANVNYIAETLGINPAEFAEQYFRFSIMKEQKNLGFNITKLREVMLDRKDMSEIRKNHKVFDSIRTKVYTMMDFVIYRYYIEEDAKVAAANKSLPDNEKSLSEKDIFVINLRGSFNDDQKDALYYDEANRIWRKLENIMHNIKEFRGNKTREYKKKDAPRLPRILPAGRDVSAFSKLMYALTMFLDGKEINDLLTTLINKFDNIQSFLKVMPLIGVNAKFVEEYAFFKDSAKIADELRLIKSFARMGEPIADARRAMYIDAIRILGGGGGSGGGGSMRNFIINNVISNKRFHYLIRYGDPAHLHEIAKNEAVVKFVLGRIADIQKKQGQNGKNQIDRYYETCIGKDKGKSVSEKVDALTKIITGMNYDQFDKKRSVIEDTGRENAEREKFKKIISLYLTVIYHILKNIVNINARYVIGFHCVERDAQLYKEKGYDINLKKLEEKGFSSVTKLCAGIDETAPDKRKDVEKEMAERAKESIDSLESANPKLYANYIKYSDEKKAEEFTRQINREKAKTALNAYLRNTKWNVIIREDLLRIDNKTCTLFRNKAVHLEVARYVHAYINDIAEVNSYFQLYHYIMQRIIMNERYEKSSGKVSEYFDAVNDEKKYNDRLLKLLCVPFGYCIPRFKNLSIEALFDRNEAAKFDKEKKKVSGNSGSGPKKKRKVAAAYPYDVPDYA

SEQ ID NO: 282 - protein, 965 aa, Artificial Sequence
  Mutated Cas13d sequence, NLS-RfxCas13d(del5.12)-NLS-HA
MSPKKKRKVEASIEKKKSFAKGMGVKSTLVSGSKVYMTTFAEGSDARLEKIVEGDSIRSVNEGEAFSAEMADKNAGYKIGNAKFSHPKGYAVVANNPLYTGPVQQDMLGLKETLEKRYFGESADGNDNICIQVIHNILDIEKILAEYITNAAYAVNNISGLDKDIIGFGKFSTVYTYDEFKDPEHHRAAFNNNDKLINAIKAQYDEFDNFLDNPRLGYFGQAFFSKEGRNYIINYGNECYDILALLSGLRHWVVHNNEEESRISRTWLYNLDKNLDNEYISTLNYLYDRITNELTNSFSKNSAANVNYIAETLGINPAEFAEQYFRFSIMKEQKNLGFNITKLREVMLDRKDMSEIRKNHKVFDSIRTKVYTMMDFVIYRYYIEEDAKVAAANKSLPDNEKSLSEKDIFVINLRGSFNDDQKDALYYDEANRIWRKLENIMHNIKEFRGNKTREYKKKDAPRLPRILPAGRDVSAFSKLMYALTMFLDGKEINDLLTTLINKFDNIQSFLKVMPLIGVNAKFVEEYAFFKDSAKIADELRLIKSFARMGEPIADARRAMYIDAIRILGGGGGSGGGGSMRNFIINNVISNKRFHYLIRYGDPAHLHEIAKNEAVVKFVLGRIADIQKKQGQNGKNQIDRYYETCIGKDKGKSVSEKVDALTKIITGMNYDQFDKKRSVIEDTGRENAEREKFKKIISLYLTVIYHILKNIVNINARYVIGFHCVERDAQLYKEKGYDINLKKLEEKGFSSVTKLCAGIDETAPDKRKDVEKEMAERAKESIDSLESANPKLYANYIKYSDEKKAEEFTRQINREKAKTALNAYLRNTKWNVIIREDLLRIDNKTCTLFRNKAVHLEVARYVHAYINDIAEVNSYFQLYHYIMQRIIMNERYEKSSGKVSEYFDAVNDEKKYNDRLLKLLCVPFGYCIPRFKNLSIEALFDRNEGSGPKKKRKVAAAYPYDVPDYA

SEQ ID NO: 283 - protein, 963 aa, Artificial Sequence
  Mutated Cas13d sequence, NLS-RfxCas13d(del5.13)-NLS-HA
MSPKKKRKVEASIEKKKSFAKGMGVKSTLVSGSKVYMTTFAEGSDARLEKIVEGDSIRSVNEGEAFSAEMADKNAGYKIGNAKFSHPKGYAVVANNPLYTGPVQQDMLGLKETLEKRYFGESADGNDNICIQVIHNILDIEKILAEYITNAAYAVNNISGLDKDIIGFGKFSTVYTYDEFKDPEHHRAAFNNNDKLINAIKAQYDEFDNFLDNPRLGYFGQAFFSKEGRNYIINYGNECYDILALLSGLRHWVVHNNEEESRISRTWLYNLDKNLDNEYISTLNYLYDRITNELTNSFSKNSAANVNYIAETLGINPAEFAEQYFRFSIMKEQKNLGFNITKLREVMLDRKDMSEIRKNHKVFDSIRTKVYTMMDFVIYRYYIEEDSEKDIFVINLRGSFNDDQKDALYYDEANRIWRKLENIMHNIKEFRGNKTREYKKKDAPRLPRILPAGRDVSAFSKLMYALTMFLDGKEINDLLTTLINKFDNIQSFLKVMPLIGVNAKFVEEYAFFKDSAKIADELRLIKSFARMGEPIADARRAMYIDAIRILGGGGGSGGGGSMRNFIINNVISNKRFHYLIRYGDPAHLHEIAKNEAVVKFVLGRIADIQKKQGQNGKNQIDRYYETCIGKDKGKSVSEKVDALTKIITGMNYDQFDKKRSVIEDTGRENAEREKFKKIISLYLTVIYHILKNIVNINARYVIGFHCVERDAQLYKEKGYDINLKKLEEKGFSSVTKLCAGIDETAPDKRKDVEKEMAERAKESIDSLESANPKLYANYIKYSDEKKAEEFTRQINREKAKTALNAYLRNTKWNVIIREDLLRIDNKTCTLFRNKAVHLEVARYVHAYINDIAEVNSYFQLYHYIMQRIIMNERYEKSSGKVSEYFDAVNDEKKYNDRLLKLLCVPFGYCIPRFKNLSIEALFDRNEAAKFDKEKKKVSGNSGSGPKKKRKVAAAYPYDVPDYA

SEQ ID NO: 284 - protein, 948 aa, Artificial Sequence
  Mutated Cas13d sequence, NLS-RfxCas13d(del5.12+5.13)-NLS-HA
MSPKKKRKVEASIEKKKSFAKGMGVKSTLVSGSKVYMTTFAEGSDARLEKIVEGDSIRSVNEGEAFSAEMADKNAGYKIGNAKFSHPKGYAVVANNPLYTGPVQQDMLGLKETLEKRYFGESADGNDNICIQVIHNILDIEKILAEYITNAAYAVNNISGLDKDIIGFGKFSTVYTYDEFKDPEHHRAAFNNNDKLINAIKAQYDEFDNFLDNPRLGYFGQAFFSKEGRNYIINYGNECYDILALLSGLRHWVVHNNEEESRISRTWLYNLDKNLDNEYISTLNYLYDRITNELTNSFSKNSAANVNYIAETLGINPAEFAEQYFRFSIMKEQKNLGFNITKLREVMLDRKDMSEIRKNHKVFDSIRTKVYTMMDFVIYRYYIEEDSEKDIFVINLRGSFNDDQKDALYYDEANRIWRKLENIMHNIKEFRGNKTREYKKKDAPRLPRILPAGRDVSAFSKLMYALTMFLDGKEINDLLTTLINKFDNIQSFLKVMPLIGVNAKFVEEYAFFKDSAKIADELRLIKSFARMGEPIADARRAMYIDAIRILGGGGGSGGGGSMRNFIINNVISNKRFHYLIRYGDPAHLHEIAKNEAVVKFVLGRIADIQKKQGQNGKNQIDRYYETCIGKDKGKSVSEKVDALTKIITGMNYDQFDKKRSVIEDTGRENAEREKFKKIISLYLTVIYHILKNIVNINARYVIGFHCVERDAQLYKEKGYDINLKKLEEKGFSSVTKLCAGIDETAPDKRKDVEKEMAERAKESIDSLESANPKLYANYIKYSDEKKAEEFTRQINREKAKTALNAYLRNTKWNVIIREDLLRIDNKTCTLFRNKAVHLEVARYVHAYINDIAEVNSYFQLYHYIMQRIIMNERYEKSSGKVSEYFDAVNDEKKYNDRLLKLLCVPFGYCIPRFKNLSIEALFDRNEGSGPKKKRKVAAAYPYDVPDYA

SEQ ID NO: 285 - protein, 983 aa, Artificial Sequence
  Mutated Cas13d sequence, NLS-RfxCas13d(del13)-NLS-HA
MSPKKKRKVEASIEKKKSFAKGMGVKSTLVSGSKVYMTTFAEGSDARLEKIVEGDSIRSVNEGEAFSAEMADKNAGYKIGNAKFSHPKGYAVVANNPLYTGPVQQDMLGLKETLEKRYFGESADGNDNICIQVIHNILDIEKILAEYITNAAYAVNNISGLDKDIIGFGKFSTVYTYDEFKDPEHHRAAFNNNDKLINAIKAQYDEFDNFLDNPRLGYFGQAFFSKEGRNYIINYGNECYDILALLSGLRHWVVHNNEEESRISRTWLYNLDKNLDNEYISTLNYLYDRITNELTNSFSKNSAANVNYIAETLGINPAEFAEQYFRFSIMKEQKNLGFNITKLREVMLDRKDMSEIRKNHKVFDSIRTKVYTMMDFVIYRYYIEEDSEKDIFVINLRGSFNDDQKDALYYDEANRIWRKLENIMHNIKEFRGNKTREYKKKDAPRLPRILPAGRDVSAFSKLMYALTMFLDGKEINDLLTTLINKFDNIQSFLKVMPLIGVNAKFVEEYAFFKDSAKIADELRLIKSFARMGEPIADARRAMYIDAIRILGTNLSYDELKALADTFSLDENGNKLKKGKHGMRNFIINNVISNKRFHYLIRYGDPAHLHEIAKNEAVVKFVLGRIADIQKKQGQNGKNQIDRYYETCIGKDKGKSVSEKVDALTKIITGMNYDQFDKKRSVIEDTGRENAEREKFKKIISLYLTVIYHILKNIVNINARYVIGFHCVERDAQLYKEKGYDINLKKLEEKGFSSVTKLCAGIDETAPDKRKDVEKEMAERAKESIDSLESANPKLYANYIKYSDEKKAEEFTRQINREKAKTALNAYLRNTKWNVIIREDLLRIDNKTCTLFRNKAVHLEVARYVHAYINDIAEVNSYFQLYHYIMQRIIMNERYEKSSGKVSEYFDAVNDEKKYNDRLLKLLCVPFGYCIPRFKNLSIEALFDRNEAAKFDKEKKKVSGNSGSGPKKKRKVAAAYPYDVPDYA

SEQ ID NO: 286 - protein, 1378 aa, Artificial Sequence
  Effector sequence used to edit ADAR2 expression
MIEKKKSFAKGMGVKSTLVSGSKVYMTTFAEGSDARLEKIVEGDSIRSVNEGEAFSAEMADKNAGYKIGNAKFSHPKGYAVVANNPLYTGPVQQDMLGLKETLEKRYFGESADGNDNICIQVIHNILDIEKILAEYITNAAYAVNNISGLDKDIIGFGKFSTVYTYDEFKDPEHHRAAFNNNDKLINAIKAQYDEFDNFLDNPRLGYFGQAFFSKEGRNYIINYGNECYDILALLSGLRHWVVHNNEEESRISRTWLYNLDKNLDNEYISTLNYLYDRITNELTNSFSKNSAANVNYIAETLGINPAEFAEQYFRFSIMKEQKNLGFNITKLREVMLDRKDMSEIRKNHKVFDSIRTKVYTMMDFVIYRYYIEEDAKVAAANKSLPDNEKSLSEKDIFVINLRGSFNDDQKDALYYDEANRIWRKLENIMHNIKEFRGNKTREYKKKDAPRLPRILPAGRDVSAFSKLMYALTMFLDGKEINDLLTTLINKFDNIQSFLKVMPLIGVNAKFVEEYAFFKDSAKIADELRLIKSFARMGEPIADARRAMYIDAIRILGTNLSYDELKALADTFSLDENGNKLKKGKHGMRNFIINNVISNKRFHYLIRYGDPAHLHEIAKNEAVVKFVLGRIADIQKKQGQNGKNQIDRYYETCIGKDKGKSVSEKVDALTKIITGMNYDQFDKKRSVIEDTGRENAEREKFKKIISLYLTVIYHILKNIVNINARYVIGFHCVERDAQLYKEKGYDINLKKLEEKGFSSVTKLCAGIDETAPDKRKDVEKEMAERAKESIDSLESANPKLYANYIKYSDEKKAEEFTRQINREKAKTALNAYLRNTKWNVIIREDLLRIDNKTCTLFRNKAVALEVARYVHAYINDIAEVNSYFQLYHYIMQRIIMNERYEKSSGKVSEYFDAVNDEKKYNDRLLKLLCVPFGYCIPRFKNLSIEALFDRNEAAKFDKEKKKVSGNSSRGSGPKKKRKVAAAYPYDVPDYAGSQLHLPQVLADAVSRLVLGKFGDLTDNFSSPHARRKVLAGVVMTTGTDVKDAKVISVSTGTKCINGEYMSDRGLALNDCHAEIISRRSLLRFLYTQLELYLNNKDDQKRSIFQKSERGGFRLKENVQFHLYISTSPCGDARIFSPHEPILEEPADRHPNRKARGQLRTKIESGQGTIPVRSNASIQTWDGVLQGERLLTMSCSDKIARWNVVGIQGSLLSIFVEPIYFSSIILGSLYHGDHLSRAMYQRISNIEDLPPLYTLNKPLLSGISNAEARQPGKAPNFSVNWTVGDSAIEVINATTGKDELGRASRLCKHALYCRWMRVHGKVPSHLLRSKITKPNVYHESKLAAKEYQAAKARLFTAFIKAGLGAWVEKPTEQDQFSLT

SEQ ID NO: 287 - protein, 11 aa, Artificial Sequence
  HIV NES
LQLPPLERLTL

SEQ ID NO: 288 - protein, 26 aa, Artificial Sequence
  Cas sequence
  misc_feature (2)..(2): Xaa can be any naturally occurring amino acid
  misc_feature (8)..(12): Xaa can be any naturally occurring amino acid
  misc_feature (15)..(15): Xaa can be any naturally occurring amino acid
  misc_feature (18)..(19): Xaa can be any naturally occurring amino acid
  misc_feature (21)..(26): Xaa can be any naturally occurring amino acid
LXGKEINXXXXXLIXKFXXIXXXXXX

SEQ ID NO: 289 - protein, 50 aa, Artificial Sequence
  Cas sequence
  misc_feature (3)..(3): Xaa can be any naturally occurring amino acid
  misc_feature (5)..(6): Xaa can be any naturally occurring amino acid
  misc_feature (9)..(13): Xaa can be any naturally occurring amino acid
  misc_feature (15)..(15): Xaa can be any naturally occurring amino acid
  misc_feature (17)..(31): Xaa can be any naturally occurring amino acid
  misc_feature (33)..(38): Xaa can be any naturally occurring amino acid
  misc_feature (41)..(50): Xaa can be any naturally occurring amino acid
RNXIXXNVXXXXXFXYXXXXXXXXXXXXXXXNXXXXXXVLXXXXXXXXXX

SEQ ID NO: 290 - protein, 33 aa, Artificial Sequence
  Cas sequence
  misc_feature (2)..(6): Xaa can be any naturally occurring amino acid
  misc_feature (8)..(10): Xaa can be any naturally occurring amino acid
  misc_feature (12)..(13): Xaa can be any naturally occurring amino acid
  misc_feature (15)..(16): Xaa can be any naturally occurring amino acid
  misc_feature (18)..(18): Xaa can be any naturally occurring amino acid
  misc_feature (20)..(27): Xaa can be any naturally occurring amino acid
  misc_feature (31)..(33): Xaa can be any naturally occurring amino acid
LXXXXXYXXXKXXVXXNXRXXXXXXXXERDXXX

SEQ ID NO: 291 - protein, 21 aa, Artificial Sequence
  Cas sequence
  misc_feature (3)..(3): Xaa can be any naturally occurring amino acid
  misc_feature (5)..(7): Xaa can be any naturally occurring amino acid
  misc_feature (9)..(9): Xaa can be any naturally occurring amino acid
  misc_feature (13)..(16): Xaa can be any naturally occurring amino acid
  misc_feature (19)..(21): Xaa can be any naturally occurring amino acid
PFXYXXXRXKNLXXXXLFXXX

SEQ ID NO: 292 - protein, 1057 aa, Artificial Sequence
  MH 4866
MEENKVRFTNTSNVKRPKSLLKQMGHKSTFLLDDTLIVTSVAKGKNEDQKGKEQAASKSKVAPQSHIELLSTIDGEVLGGRKELLATTVSRQEVTISGKIYNLNTKTPESTTVTMANPAVLLQKNSSTTQVARKTDYLGIKSALEKEFFNDFSNSGFNDNVRVQIAYNILDIRKILATTINNIVSMFYNLDRTTGDIADETKKSTNTDIIGMIKTYLKYDQAKNSNDPSIKKTFNKAEELLINTKAYHTYFDRLFTTPTRQAFKAGKLKDTNDKKSNLPCEFSKLSEKDQEEFKNEAITHNYDVLRLLGLGRQLVVHEKYKSDEHNKDNSIESLFNIDKIIRNSNDTMDLLKRLDNIYLESAEQIDNSFKKSSATNCLILEELYKRIGKAKTQAELYKDYYRYAILKEDQCLGISFNRIKEAVLEKLKEEQRYKNFEYRNDNKRFYTLCNFVLWHYMVDLRDRNETRAGHQQTDRNEIEELKSKLRACCDNNGDGGENQKYAIYKEFVNFHWTDLRTSINTLYDLCVKYKYTAKNYRIDSKIQIDNQLSSSANNVKTFVKYIYFLSEFLDGKEVNVFFNELVEKFSNIAEIVTTVNDNINNSSKKSPNISFLPQYSLFQEAGTVADQLRNARNIKHATLRARINDKVADKDSKMSPSKQTISDALYMLIDENDTIENYKQLIWDEKESGTWVKKATGNNKVRNFIINNIIMSKWFMYISKYSDPRNCSKIMHNKEAVVFAMSSIPDAQIEKYYKRVTAKSVQYGNKTAEEMRSIVIDALMNFSLKPVLTGVANNDYSNENRERDIGIIQLYLTVAYIVTKSLVNVNKRFLLAFSCLERDVPLILNGKSFKDANILVLSEKFIAEDQEIEQKYKLAKKNRITPNMSKEDVKNVFKELNAEYKSKHYAESLTRPRDPDSKKDKSCAYLVNNLNEAKKIENVLMDFKNKVDHLNVVKSAPEYMSNIKNIDSFYGIFCFALQNILADKMIKWSVNEKNSKEDVEIINSYGQELKKKLDSRHTFDRDAMWIINMPFAYNFPRYKNLSSEYLFYDKEYEKTKK

SEQ ID NO: 293 - protein, 945 aa, Artificial Sequence
  037 - emb OIZA01000315.1 compressed
MAKKKRMTAKERKQNHRESLMKKADSNAEKEKAKKPVVENKPDTAISKDNKPKPNKEIKKSKAKLAGVKWIIKANDDVTYISSFGKGNNSVLEKRIIGDVSGDVNKDSHMYVNPKYTKKNYEIKNGFSSGSSLVTYPNKPDKNSGMDALCLKPYFEIDFFGHIFTDNMHIQAIYNIFDIEKILAKHITNIIYTVNSFDRNYNQSGNDTIGFDLNYRVPYLEYGGGKDSNGKPNKISAWKKRENFINFYNEAKPHLGYYENIFYDHGEPISEEKFYNYLNILNFIRNNTFHYKDNDIELYSENYSEEYVFINCLNEFVKNKFKNVNKNFISNEKNNLYIILKAYGEDTENVEVVKKYSKELYKLSVLKTNKNLGVNVKKLRESAIEYGYCPLPYDKEKEVAKLSSVKHKLYKTYDFVITHYLNSNDKLLLEIVETLRLSKNDDEKENVYKKYAEKLFKADDVINPIKAISKLFAEKGNKLFKEKIIIKKEYIEDVSIDKNIYDFTKVIFFMTCFLDGKEINDLLTNIISKLQVIEDHNNVIKFIFHNKDAVYKDYSDKYAIFRNAGKIATELEAIKSIARMENKIENAPKEPLLKDALLALGVSSNDFDEKYEKYFKTDVDADKDHQKVSTFLMNNVINNSRFKYVVKYINPADINGLAKNRYLVKFVLSKIPEEQIDSYYKLFSNEEEPSCEEKIKLLTKKISKLNFQTLFENNKIPNVEKERKKAIITLYFTIVYILVKNLVNINGLYTLALYFVERDGFFYKQICEKKLIETLKKKDKKQLYNDDDYLLLPEIFSGSKYREETKNLKLPKEKDRDIMKKYLPNDKDREEYNKFFKQYRNNIVHLKIIAKLSELTKNIDKDINSYFDIYHYCTQRVMFDYCKKNNNVVLAKMKDLAHIKSDCDEFSSKHTYPYSSAVLRFMNLPFAYNVPRFKNLSYKKFFDKQ

SEQ ID NO: 294 - protein, 924 aa, Artificial Sequence
  PIG-022 GL0026351 compressed
MAESYKIKSKKTRTKRAGLKSSFVNENKGLMTAFGKGNNAVIEKRISGNLIENVSNKPRFSVEFGNKEYIINDKKLGIVSDDPRESQKPVGEDGIHCKRALEERYFGKTFNDNIHIQLIYSILDLEKILAVHSNNIVYTFDNLRRKETDEYDDFIGYMSTVNSYEEFMNPEKLLPGKDQSVYDNINRSRETFLEYRKNPRLGYFGKVFYEKVTDPKNKSKKKMRLISEKEMYYIFALLGGLRQFCTHDKNRARNWLYSLDTMLNDDAKAVLDKYYVSTVSSLNKHFVDNSAKKDFSIIFNALNITDIELKKNIAKEYYEFVCRKNFKNIGFSIKKLREYLLEKPEFCNLKEDKYNSVRSKLYRLIDFIIYLNYKDAKFENDNDEKIERFVSKLRKCPDEASKETVYQTESDIIKKSIYGSINSIKRGMMSVKSKYGKLELDKQTINQLKRAVDDISINTKGDYFTKLMYLISLLIDGKEINDLLTTLIHQFENIASFIDVMKKENINYEFAEKYKFFNTSKNIACELRTVNSFARMTGFMENDESTKFIMFREAADILGTSYTDDELTDHLNLKKTRLNARSKADTGLRNFIISNVIKSSRFKYLIRYSNPKKVKAIAENKKLVRFVLDKIPDPQIIRYCNTCGFKVGERQENINTLAKAITNFSFSAFEKVKQSANVENDTPDAIDKAQKQGLISLYLTVLYLFIKNMVYVNSRYVLAFHCLERDSQLLKITSGYNNSSYNNLTNYFIDNKYLNPHASRYLKVNISNADEWSIVKFRNGTAHLNSVRNIDTCIEGLKDFKSYFEIYAYTVQKSIKKYFDAEFSEDRNIEDGKISLCNGVYIHERQKNGKPKITVKINPKTIEYMESVDKYGSYTKDFVKALNTPFGYCLARYKNLSIEPLFDRNTVYNKEDVTEEFSVNSKEQ

SEQ ID NO: 295 - protein, 1022 aa, Artificial Sequence
  PIG-046 GL0077813 compressed
MAKKITAKQRREERERQNKQKWAKKQDDATAVFECEANIKPADSKDEDCANTSIKRKKTQAKAMGLKTVLGFDNKIAIASFTSSKDSKSSHIERITDPNGKTIREDVRMFDSNVDECSINLEKRMTVEERQKDGTIKKDEKDVKSTICNPYSNECGKDYIGIKSVAEELFFGRTFPNDNLRVQIAYNIFDIQKIFGTYINNIIYSFYNLSRDEFQSDNDVIGTLYMLKDFDGQKETDTFRQARALLERTEAYYSYFDNVFKKIDKKKKRNDDYEGKRNEILRYNFNVLRVLSFLRQICAHAKVKVSSDNDREKGGVFVDSLDALFNISSFFDAVAPELNEVINSVYSKGIYDINDNFVKNDKNNFYILSKIYPEVARENLLKEYYYFVVSKEGNNIGISTKKLKEAIIAQDMSYIKSKDYDTYRNKLYTVLCFILVKELNERTTIREQMVADLRANMNGDIGREDIYSKYAKIIYAQVKPRFDGMKNVFEEEAKGVIVPDKEEAVKFSNGALDKSEIERFCITSANTDSVAKIIYFLCKFLDGKEINEFCCAMMNKLDGINDLMETAEQCGAKIEFVDNFNVLSKCGTISGQIRVVKSISKMKKEIDVDNETIFLDAFELLGKRIEKYKKDDSGNVLRNDDGKVLRTKEYNNIRKMLCKKDRRLNFIANSIIKNKWFSYIVRYNQPSECQAIMKNKTLVKFALDELPDLQIQRYFVALYGDEDLPSYGEMRKILLKKLHDFSIRDFDEEIGSLFDEMKRKDKFCESDRKKCLFRLYLTIAYLITKSMVKINTRFSIACATYERDYALLCASNKQERAWSSGATALALTRKFLNQDKLIFEKHYAREGEISKLPKEERKAMRKVNDQLLKQTHFSKHSYCYIVDNVNRLTGGECRTDKRVLPVLNEKNDNAGILSDFRKTIAHLNVVHKMVDYVAEIKGITSYYAFFCYVLQRMPVGNKNEKNALKEKYSETAKSYGTYSKDFMWLINLPFAYNLPRYKNLSNEQLFYDEEERNETEGQIDRL

SEQ ID NO: 296 - protein, 1027 aa, Artificial Sequence; identical to SEQ ID NO: 170
  pig chimera compressed

SEQ ID NO: 297 - protein, 966 aa, Ruminococcus flavefaciens
IEKKKSFAKGMGVKSTLVSGSKVYMTTFAEGSDARLEKIVEGDSIRSVNEGEAFSAEMADKNAGYKIGNAKFSHPKGYAVVANNPLYTGPVQQDMLGLKETLEKRYFGESADGNDNICIQVIHNILDIEKILAEYITNAAYAVNNISGLDKDIIGFGKFSTVYTYDEFKDPEHHRAAFNNNDKLINAIKAQYDEFDNFLDNPRLGYFGQAFFSKEGRNYIINYGNECYDILALLSGLAHWVVANNEEESRISRTWLYNLDKNLDNEYISTLNYLYDRITNELTNSFSKNSAANVNYIAETLGINPAEFAEQYFRFSIMKEQKNLGFNITKLREVMLDRKDMSEIRKNHKVFDSIRTKVYTMMDFVIYRYYIEEDAKVAAANKSLPDNEKSLSEKDIFVINLRGSFNDDQKDALYYDEANRIWRKLENIMHNIKEFRGNKTREYKKKDAPRLPRILPAGRDVSAFSKLMYALTMFLDGKEINDLLTTLINKFDNIQSFLKVMPLIGVNAKFVEEYAFFKDSAKIADELRLIKSFARMGEPIADARRAMYIDAIRILGTNLSYDELKALADTFSLDENGNKLKKGKHGMRNFIINNVISNKRFHYLIRYGDPAHLHEIAKNEAVVKFVLGRIADIQKKQGQNGKNQIDRYYETCIGKDKGKSVSEKVDALTKIITGMNYDQFDKKRSVIEDTGRENAEREKFKKIISLYLTVIYHILKNIVNINARYVIGFHCVERDAQLYKEKGYDINLKKLEEKGFSSVTKLCAGIDETAPDKRKDVEKEMAERAKESIDSLESANPKLYANYIKYSDEKKAEEFTRQINREKAKTALNAYLRNTKWNVIIREDLLRIDNKTCTLFANKAVALEVARYVHAYINDIAEVNSYFQLYHYIMQRIIMNERYEKSSGKVSEYFDAVNDEKKYNDRLLKLLCVPFGYCIPRFKNLSIEALFDRNEAAKFDKEKKKVSGNS

SEQ ID NO: 298 - protein, 966 aa, Artificial Sequence
  CasRx/Cas13d
IEKKKSFAKGMGVKSTLVSGSKVYMTTFAEGSDARLEKIVEGDSIRSVNEGEAFSAEMADKNAGYKIGNAKFSHPKGYAVVANNPLYTGPVQQDMLGLKETLEKRYFGESADGNDNICIQVIHNILDIEKILAEYITNAAYAVNNISGLDKDIIGFGKFSTVYTYDEFKDPEHHRAAFNNNDKLINAIKAQYDEFDNFLDNPRLGYFGQAFFSKEGRNYIINYGNECYDILALLSGLRHWVVHNNEEESRISRTWLYNLDKNLDNEYISTLNYLYDRITNELTNSFSKNSAANVNYIAETLGINPAEFAEQYFRFSIMKEQKNLGFNITKLREVMLDRKDMSEIRKNHKVFDSIRTKVYTMMDFVIYRYYIEEDAKVAAANKSLPDNEKSLSEKDIFVINLRGSFNDDQKDALYYDEANRIWRKLENIMHNIKEFRGNKTREYKKKDAPRLPRILPAGRDVSAFSKLMYALTMFLDGKEINDLLTTLINKFDNIQSFLKVMPLIGVNAKFVEEYAFFKDSAKIADELRLIKSFARMGEPIADARRAMYIDAIRILGTNLSYDELKALADTFSLDENGNKLKKGKHGMRNFIINNVISNKRFHYLIRYGDPAHLHEIAKNEAVVKFVLGRIADIQKKQGQNGKNQIDRYYETCIGKDKGKSVSEKVDALTKIITGMNYDQFDKKRSVIEDTGRENAEREKFKKIISLYLTVIYHILKNIVNINARYVIGFHCVERDAQLYKEKGYDINLKKLEEKGFSSVTKLCAGIDETAPDKRKDVEKEMAERAKESIDSLESANPKLYANYIKYSDEKKAEEFTRQINREKAKTALNAYLRNTKWNVIIREDLLRIDNKTCTLFRNKAVHLEVARYVHAYINDIAEVNSYFQLYHYIMQRIIMNERYEKSSGKVSEYFDAVNDEKKYNDRLLKLLCVPFGYCIPRFKNLSIEALFDRNEAAKFDKEKKKVSGNS

SEQ ID NO: 299 - protein, 877 aa, Artificial Sequence; identical to SEQ ID NO: 153
  Cas13d (contig tpg DJXD01000002.1

SEQ ID NO: 300 - DNA, 36 bp, Artificial Sequence; identical to SEQ ID NO: 154
  Cas13d (contig tpg DJXD01000002.1

SEQ ID NO: 301 - protein, 1027 aa, Artificial Sequence; identical to SEQ ID NO: 170
  contig emb OBLI01020244

SEQ ID NO: 302 - protein, 348 aa, Homo sapiens [sequence omitted]

SEQ ID NO: 303 - protein, 154 aa, Homo sapiens [sequence omitted]

SEQ ID NO: 304 - protein, 160 aa, Homo sapiens
MLLLLLSIIVLHVAVLVLLFVSTIVSQWIVGNGHATDLWQNCSTSSSGNVHHCFSSSPNEWLQSVQATMILSIIFSILSLFLFFCQLFTLTKGGRFYITGIFQILAGLCVMSAAAIYTVRHPEWHLNSDYSYGFAYILAWVAFPLALLSGVIYVILRKRE

SEQ ID NO: 305 - protein, 306 aa, Homo sapiens
MAAAAAAAAAAGAAGGRGSGPGRRRHLVPGAGGEAGEGAPGGAGDYGNGLESEELEPEELLLEPEPEPEPEEEPPRPRAPPGAPGPGPGSGAPGSQEEEEEPGLVEGDPGDGAIEDPELEAIKARVREMEEEAEKLKELQNEVEKQMNMSPPPGNAGPVIMSIEEKMEADARSIYVGNVDYGATAEELEAHFHGCGSVNRVTILCDKFSGHPKGFAYIEFSDKESVRTSLALDESLFRGRQIKVIPKRTNRPGISTTDRGFPRARYRARTTNYNSSRSRFYSGFNSRPRGRVYRGRARATSWYSPY

SEQ ID NO: 306 - protein, 695 aa, Homo sapiens [sequence omitted]

SEQ ID NO: 307 - protein, 231 aa, Homo sapiens
MPSQQKKIIFCMAGVFSFACALGVVTALGTPLWIKATVLCKTGALLVNASGQELDKFMGEMQYGLFHGEGVRQCGLGARPFRFSFFPDLLKAIPVSIHVNVILFSAILIVLTMVGTAFFMYNAFGKPFETLHGPLGLYLLSFISGSCGCLVMILFASEVKIHHLSEKIANYKEGTYVYKTQSEKYTTSFWVIFFCFFVHFLNGLLIRLAGFQFPFAKSKDAETTNVAADLM

SEQ ID NO: 308 - protein, 317 aa, Homo sapiens [sequence omitted]

SEQ ID NO: 309 - protein, 317 aa, Homo sapiens [sequence omitted]

SEQ ID NO: 310 - protein, 585 aa, Homo sapiens
MTITYTSQVANARLGSFSRLLLCWRGSIYKLLYGEFLIFLLCYYIIRFIYRLALTEEQQLMFEKLTLYCDSYIQLIPISFVLGFYVTLVVTRWWNQYENLPWPDRLMSLVSGFVEGKDEQGRLLRRTLIRYANLGNVLILRSVSTAVYKRFPSAQHLVQAGFMTPAEHKQLEKLSLPHNMFWVPWVWFANLSMKAWLGGRIRDPILLQSLLNEMNTLRTQCGHLYAYDWISIPLVYTQVVTVAVYSFFLTCLVGRQFLNPAKAYPGHELDLVVPVFTFLQFFFYVGWLKVAEQLINPFGEDDDDFETNWIVDRNLQVSLLAVDEMHQDLPRMEPDMYWNKPEPQPPYTAASAQFRRASFMGSTFNISLNKEEMEFQPNQEDEEDAHAGIIGRFLGLQSHDHHPPRANSRTKLLWPKRESLLHEGLPKNHKAAKQNVRGQEDNKAWKLKAVDAFKSAPLYQRPGYYSAPQTPLSPTPMFFPLEPSAPSKLHSVTGIDTKDKSLKTVSSGAKKSFELLSESDGALMEHPEVSQVRRKTVEFNLTDMPEIPENHLKEPLEQSPTNIHTTLKDHMDPYWALENRDEAHS

SEQ ID NO: 311 - protein, 1274 aa, Homo sapiens
MPEPGKKPVSAFSKKPRSVEVAAGSPAVFEAETERAGVKVRWQRGGSDISASNKYGLATEGTRHTLTVREVGPADQGSYAVIAGSSKVKFDLKVIEAEKAEPMLAPAPAPAEATGAPGEAPAPAAELGESAPSPKGSSSAALNGPTPGAPDDPIGLFVMRPQDGEVTVGGSITFSARVAGASLLKPPVVKWFKGKWVDLSSKVGQHLQLHDSYDRASKVYLFELHITDAQPAFTGSYRCEVSTKDKFDCSNFNLTVHEAMGTGDLDLLSAFRRTSLAGGGRRISDSHEDTGILDFSSLLKKRDSFRTPRDSKLEAPAEEDVWEILRQAPPSEYERIAFQYGVTDLRGMLKRLKGMRRDEKKSTAFQKKLEPAYQVSKGHKIRLTVELADHDAEVKWLKNGQEIQMSGSKYIFESIGAKRTLTISQCSLADDAAYQCVVGGEKCSTELFVKEPPVLITRPLEDQLVMVGQRVEFECEVSEEGAQVKWLKDGVELTREETFKYRFKKDGQRHHLIINEAMLEDAGHYALCTSGGQALAELIVQEKKLEVYQSIADLMVGAKDQAVFKCEVSDENVRGVWLKNGKELVPDSRIKVSHIGRVHKLTIDDVTPADEADYSFVPEGFACNLSAKLHFMEVKIDFVPRQEPPKIHLDCPGRIPDTIVVVAGNKLRLDVPISGDPAPTVIWQKAITQGNKAPARPAPDAPEDTGDSDEWVFDKKLLCETEGRVRVETTKDRSIFTVEGAEKEDEGVYTVTVKNPVGEDQVNLTVKVIDVPDAPAAPKISNVGEDSCTVQWEPPAYDGGQPILGYILERKKKKSYRWMRLNFDLIQELSHEARRMIEGVVYEMRVYAVNAIGMSRPSPASQPFMPIGPPSEPTHLAVEDVSDTTVSLKWRPPERVGAGGLDGYSVEYCPEGCSEWVAALQGLTEHTSILVKDLPTGARLLFRVRAHNMAGPGAPVTTTEPVTVQEILQRPRLQLPRHLRQTIQKKVGEPVNLLIPFQGKPRPQVTWTKEGQPLAGEEVSIRNSPTDTILFIRAARRVHSGTYQVTVRIENMEDKATLVLQVVDKPSPPQDLRVTDAWGLNVALEWKPPQDVGNTELWGYTVQKADKKTMEWFTVLEHYRRTHCVVPELIIGNGYYFRVFSQNMVGFSDRAATTKEPVFIPRPGITYEPPNYKALDFSEAPSFTQPLVNRSVIAGYTAMLCCAVRGSPKPKISWFKNGLDLGEDARFRMFSKQGVLTLEIRKPCPFDGGIYVCRATNLQGEARCECRLEVRVPQ

SEQ ID NO: 312 - protein, 269 aa, Homo sapiens
MSDEEVEQVEEQYEEEEEAQEEAAEVHEEVHEPEEVQEDTAEEDAEEEKPRPKLTAPKIPEGEKVDFDDIQKKRQNKDLMELQALIDSHFEARKKEEEELVALKERIEKRRAERAEQQRIRAEKERERQNRLAEEKARREEEDAKRRAEDDLKKKKALSSMGANYSSYLAKADQKRGKKQTAREMKKKILAERRKPLNIDHLGEDKLRDKAKELWETLHQLEIDKFEFGEKLKRQKYDITTLRSRIDQAQKHSKKAGTPAKGKVGGRWK

SEQ ID NO: 313 - protein, 210 aa, Homo sapiens
MADGSSDAAREPRPAPAPIRRRSSNYRAYATEPHAKKKSKISASRKLQLKTLLLQIAKQELEREAEERRGEKGRALSTRCQPLELAGLGFAELQDLCRQLHARVDKVDEERYDIEAKVTKNITEIADLTQKIFDLRGKFKRPTLRRVRISADAMMQALLGARAKESLDLRAHLKQVKKEDTEKENREVGDWRKNIDALSGMEGRKKKFES

SEQ ID NO: 314 - DNA, 2768 bp, Homo sapiens
tggggtttttcccattcccaggactgcctcctccacctctagccccaggggactctgtgctgcttggctctgctcattgctcaatccagccatcccagggtcagggatcaggtggaagctggcagtttcaatctatcctgtggatagagtgtgaaagcaacaaaacccaccaccgttaataccaacataggagctgagcttttaatggcccaatttgccttagtctccaggcagagctgggtaaagctagagcttctggctttgcttatatggagaagggggagcagttactgaggcagcttaattctgacacctcagagatgtggccagctttttggagcagattctccagaatggagaatggactagcaactgctgaagatgggcttgtctggcaagggaaactggaaactggggcccatgaacatccccaaggaaggtaggcccagtggaatttcccactctttgtttctaagctcttcgagataaggatgacatcagggactcagctgttaattaaatgtgggcgggtgagcatggcttctagaggctccatgctctagatgctgggacccaggtgctagagcaaaagagcaggtggcttccagaggctgagagaaaggcctgtctctccataggccacattgggaaggggaggcacgggacctggggccccacactaggggtgagaccccaggcccaatctcaccctcattgggaacttggccttcaccgtccccctcccccagtgttgttttttcaggtctgatgactgcattctgcattcctgtgactgtccctgcctacagcccaacccccagccctggtctggccttgatgcctagctaatttttaaaaacctgccccaaggttgggtgaaaccccatcatctgaatgcccaatctcaaaatgttcactatcaggaggtgataatcatagtaattaactagttacattaattgatgttattcacaacattaactagaatctgtacagcttcttgctatttacaaagtgctgaaacacacacatagacacacacacacctcttttggtcttctcagtagctgcgtgtcggcaggaccagggatctgggatttccattttataggagaagaaagtgaggcccagggagggaaaaacaactgctccatatcattagccaagtatgagttgctgctgctgcgagggtctgagaggatagatatgttctcccttcccattcattcctccattccttcctgcatccatccagcatttattaagcacctactgtgtgccccattctgtgctagacacttatccctaagctgggacacttttccagaaagcaagaatcctcgtgttcctgaaagatgagttgggaggaggaggggcacacatcccgctggccttggggaacgtgggactccagatcagtaggtcttggtggatgtcccttctcaggctgtcccaggtgagtgaggagcctcattaattatttcttaaaaaaaaaaaaaaaattaaggagcctatgtgacttcgttcattctgcacaggcgctgctcctggtgggatggctgtggctgggggaaggtgtaggggatgggagacgcctatagtcggccacagagtcctaggcaggtcttaggccggggccacctggctcgtctccgtcttggacacggtagcagaggcctcatcgtcacccagtgggttcttgccgcagcagatggtggtgagcatgcagttccggaactgcttgttcatcatgatatagatgacagggttgtagatggcggcgctcttggcaaagaacgctgggatggtcatgaagatgggaccgaagttggagccctggtgggtgaagatgtagaatgccacgctggcgtagggcacccagcagatcaggaaagcgatgaccatgatgatgaccatgcgggtgacctccttctctgccttctgtgtggtggctgactcctgctgctgggcagcggcctccttgacggtgaagacgagctgcccatagcagaaaaagatgataatcatggggatggtgaagtggaccacgaacatgtagatgacaaaagactcgttgttgacctccggcttgagcgtgtagtagtcgattccacacgagcactgcaggccctcggggatgtacctggaccagccggcgagtgggggtgcggcgcaggccagcgccatgacccaggtgaaggcaacgcccatgatggcatggttctccccgaagcggaagttgctcatgggcttacacaccaccacgtaccgctcgatggccaggaccaccaaggaccacagggcaatttcaccgcccagggtggcaaagaagccctccaaattgcatcctgtgggcccgaagacgaagtatccatgcagagaggtgtagagggtgctggtgaagccacctaggaccatgaagaggtcagccacggctaggttgagcaggatgtagttgagaggcgtgcgcagcttcttgtgctggacggtgacgtagagcgtgaggaagttgatggggaagcccagcacgatcagcagaaacatgtaggcggccagcatggagaactgccatggctcagccaggtagtactgtgggtactcgaaggggctgcgtaccacacccgtcgcattggagaagggcacgtagaagttagggccttctgtgccattcatggctgtggcccttgtggctgacccgtggctgctcccacccaagaatgctgcgaaggcctgagctcagccactcagggctccagctggatgactct

SEQ ID NO: 315 - DNA, 981 bp, Homo sapiens
ttttttttttttttttttagtttgaatttggattcttttaatagcctcataataagtgccatacagggtttttattcacaggcttgaatgacaaagaaattctgacaagtttaatacccatctgtgatttaagtctggcaaaatacaggtcattgaaacagacattttaactgagttttataaaactatacaaatcttccaagtgatcataaatcagtttctcactacaggtactttaaagcaactctgaaaaagtcacacaattacacttttaagattacagtgtttaatgtttatcaggatacatttctacagctagcaggataacagatgagttaaggggcctcagactacatccaagggaatgtttattgggcgatcccaattacaccacaagccaaacgacttccagcgtttcctgtctttgtactttcttcatttccacctttgcccaagtcatctgctttttcatggaccaccagtgtgcggccaatgatgcaatggtctcctgagagtgagatcacagaatcttcaatagacacatcggccacaccatctttgtcagcagtcacattgcccaagtctccaacatgcctctcttcatcctttggcccaccgtgttttctggatagaggattaaagtgaggacctgcactggtacagcctgctgtattatctccaaactcatgaacatggaatccatgcaggccttcagtcagtcctttaatgcttccccacaccttcactggtccattactttccttctgctcgaaattgatgatgccctgcactgggccgtcgcccttcagcacgcacacggccttcgtcgccataactcgctaggccacgccgaggtcctggttccgaggactgcaacggaaaccccagacgctgcaggagactacgacgcaaaccagcaccccgtctccgcgactactttataggccagacctccgcgcctcgcccactctggccccaaac

SEQ ID NO: 316 - DNA, 1828 bp, Homo sapiens
tgagttactctgatgtttattttaatgcatcttagtccacacagttggtataaaatcagaaaatgcaaagcaaaaacaaaaggtctggagtcttagcatcagaagggcaccatatatacatctacagttggtggccaatacaagtcattgccagacagtccttggaggcacagaacagcctagacccagccaagctctaggaactcacggtcccaaggagtctagacgcttgttctgatgctccgaccgtaagaaaaatgtgggagtgatgaaggctttatgatttactcattatagtaataatagcagcctagctaggtacaaaagcagttataaaccatttatattacacagaattattcaggtctccattctatcttatgttgtaaaattgttaattggatttccagtgagttgtttagatgattagtgataataaggaatggtaaatccatagcaccatttcaaagacttgttgtcactgatttctcatttagatgtgtgacgaagatactccacctgtaagggcaagtatgccaatgccacaagccgtgtttttgcaagggctccagtttgggcattttgtccgtgtgcgcgtaaagcttcacacagaggttcgggcagcggctgtttctgttggatgcactgggtcacccaccagaaaagggcttttggacatttggggtttctacccacactttggttttctaaatgaggtggactgggagggaggtatcttctttcagatgaaagggaaggggcgagatggagttatcttatttctgggtaaaacaaaacaaacaaacaaaaaacaaaacaaaaatactgagctggattatactgttaggatgtaaagttccttagctacttctttaaggctcaacacgaggctgatggtcaacataaaaagcaaacaatactatgtacatatatgtaaaaagtgttataaataggttttataaaccggagatattatatacatcttcaatcaacagcaacccccacctccactgctttctgtttggtttggtttgagtttgggattttgggctagctcttttttctttgtctgctttctgttttcccttcctcccttccctatgtacgctcagagcctcagacagaccgtctgggcgcctcattcgcgtttccgcaagatcacatagatgacaccgctgagaagggccagggggaaggccacccaggccaggatgtaggcgaaaccgtaggagtaatccgagttgagatgccactccgggtgcctcaccgtgtagatggccgcagcactcatcacgcacagaccagcaagaatttggaagattccagtgatgtaaaacctgccccccttggtgagggtgaagagttggcagaagaacaggaacagagacagaatgctgaagatgatcgacaggatcatggtggcctggacagactgcagccattcgtttggtgatgatgagaaacagtggtggacatttcctgaggaagaggtgctacagttctgccagagatcagttgcgtgtccattgcccacgatccattggctgacgatcgtggagacgaacagcagcaccagcaccgcgacgtggaggacgatgatactcagcaacaggaggagcattctggcggcaagttctgctcagcggagtttctgcccggccaaacagcgtaaccccttcttccaagcagatttctttgcagccaaatgcaagggatgttaaggcaagaccctccccacagggcagtcagagacccgcagccgacagactaagcctgcagcttccaaccaggctccccgagatgttccctggtggtgctccctgtaact

SEQ ID NO: 317 - DNA, 3118 bp, Homo sapiens
ttttttttttttttttttacacccaaaaggccaaacaatttttattttcaaaaacaactttattcatgacacatattaaaaaaaaattcccacccctggaaatgagctaaaaaaataaacaaaatccacctcccacctccctgttcccacttcctcccattccctccaaataaaagggaaaaaaggcaaaggaaaaaaaaaaaaaacaaaaaaacaaaacaactgaaaaacaaaaacacccctaaaccccccaaaacaaggtagtgcatttccccagggggaaggggaatttacactggagccgctgggagcggaacggagatcttccggctacagaaacctgcaaagaaagacactcaaaacagaaaaagaaacacaaaaggaaacaaaatagatcaccaggcaatctggaggggcagggagccggagaagaggggtggggtgggtggtagacctggctggacaggagcaggcaggaggggactgtgaaaggcgaggagaagacggagggaaggtaacaagcagaacagtttggtgtccttccagagccctgggtaaaaaaaaaaacctcctaccacccacgcccacctacccttgagcagcccccaagggggtgaagtggggcagggaaacatgggcagcagcttgcgcagttgagacgtgtccatggcgaatccccagagtgaataagcagccccctgccccactccctgggccttcccctactccccaaagcaggtccctcctcagcagttagttatgggattctccccccttccacagtatatcttttttttaaaaaatattttttttccatcaaggtcatcttctgtttttcttttttttttttttaattcttttttttttccttctttcctctttttttcctctctctcctcctaatacacactttttttagtaaggggaataccatgatgtcgctctagcccggcccctgtagacgcgaccccggggcctgctgttaaaaccactgtagaatcgagagcgggagctgttgtagttggtggtccgggcgcggtagcgggctcgtggaaaaccccggtctgttgtgctgatgcctggtctgttggttcgttttgggatcaccttgatttgccttcctctaaatagggactcatctaaggccaaggaagtcctcactgactctttgtctgagaactctatatacgcaaaccctttgggatggccactaaatttgtcacacagtatggtaacacggttgactgaaccacagccatgaaagtgagcttccagctcttctgctgttgcaccatagtccacattgccaacatagatggaacgggcatcagcctccatcttctcctcaatggacatgatcaccgggccagcattgcctggaggtggactcatattcatctgcttctctacctcgttctgtagctcctttagcttctcagcttcttcctccatctccctgactcgagctttgatagcttccagctccgggtcctcaatggcgccgtcccccgggtcaccctcgaccagtcccggctcctcctcctcctcttggctgccgggggctcccgaaccaggcccagggcccggagctcccgggggggcgcggggccggggcggctcctcttcgggctcgggctccggctcgggctccagcagcagctcctcaggctccagttcctcagactccaggccgttcccgtagtcccctgcgccccccggggccccctccccggcctccccaccggccccgggcacaagatggcgccgccgccccggcccggagccccgaccgcccgcagcccccgctgctgctgccgccgccgccgccgccgccatcgccgctcagactggggcccgccgcccggcgattggagagctgcgccggccacgccgaggactcattagtcaagctgcctgcccgtcaccatgagctagtactccattggggaatattacttggcaatcaaataaggccccacctctaaggcggggcactgcgccaaattctcaaatcccggtaggggaaatctgcctgtcaatcaacacgcgtcccacctcctatcgagtccttaggtaataataccgccacgctgtgacgatattcctgcttctccccggcctacgggcgggcccgcgaagtatgggacgctccgtgattggccctagctaggcgactggaaaggaccaatcttccgatcgcctcaccgcagtggcccagtctcagatgccgattggcttgcgagagtcgaaggggtgacactcgtttcgtgacaggtgaaccttgcccccgaaaggactgccgggcttcaaacttgggaaacccgaggtcacatgactagccagtcctagggggccgccatcttgatactactgcttgccagctagtgagctgttggccgggtgaggcccaaaacagagcagcagtttcaggaaacttgtatctcgaccaggaagcaccagtagatgggatgttgctgaaaatggaggttgtgaatgaagcattccaggagggagcttactttccccatccaggttattggcaccatcatccactagctctcccgcaccagaaagcagggaggattcctcagtccagagctactagtcacaagtcctgtctgtcccgccctcttgcgtaggccttctgctccccagttccattttctttttcctggacagcttccaatgtcacccctccaatctgcaccgctaacagactggcccccctttgctggcgaggtaaagtctcaaaaccgtaaatcacggccttcgatacgccagcatgtggttactttgtggatgttgtttccttccactcttctcgttcctttgggtgtacctgcacccagtctgtgcctctaacatgtagtcccccttcaatcaaaccactgcaaaccccagcttcccctcatttcccaggacaagtgggcctatctccacggcgcgcttaattgttttactgtttcctaactaggttgtgagcgcctgcagatgaggggccggttcctatttatattcgcatctccacggcctggcaatatgcctaccacataatgtcctgttagatgtttgttgattgaacaggcattgattggggatttgggtgccacccttcatt

SEQ ID NO: 318 - DNA, 4324 bp, Homo sapiens
tcctcttgaaaactttaatgaaaccaataagttaataagttaacaaagtgaggtacttgcatatccgagaaccgagttgatggcggaacctcgatcgtggaaggaaggagggcttcttcccatgtctccttggtcatagggtaatcccattctcctggccctctccacagctgtctctgagtgggtggaggggtggctctctggggacagtgcagtgcaggtggggtgagccaggagtggctccatccagggcatgacggtcacatgcagagggcatgttggggcagaggctgggcaccatggactgagtaagatccagtccaagccctggtgctggcgcatgcaggtccccagcacgagatgcaggcagcgtggcctcggccccttgttcccacagagggttgccattggtccactacccctcaccttcctgccacctgcattggctttgcagaagaggagcaaaggggtggggataagaaagtgttcctggagtgaatgggggctgacgcctggatgtggcgctgccaattgaagtgaagaagtggggtgtggagggaggggagacagtgcatgtgaaagccggatgcgcggttggtatagctattacatgcattcttattctctctgggagttagagtgactaggaaggcacaggcctggctagaagtgggcctggggtctctccagtggtgtcaggcctgggcccgagttgtgctgtggagacacggaggcgggcccttggggacaggcagaggcagtgggttagggctcctggaccagagaggaggagatcttcttgaagaaggggagcgggtaaaggtctgggtggggcctggagagctctcgggttacttcaaagctccttctcctgctcagatggagttgggggtcttcctcttagtggtcgtcaccctgcaaggccagtccactggcatctgctgcagaggcccaggagcggctgagtggctctgcactcatgtctccaagtgtgtcacgtcattgcatgtttaagtgtgagaggctttcttcctgtctggagaaactaaaaggctatgtttgtgcgatcgtccacgaagcactgtctgggagttttggggaggatacagaaacctgtgctgactatgagtggtgtctggagggccaaggaggggagtggccacccagcaggaggagggagcccctgggagctgacacttgcaaatgggaagaaaggcccaggcattgcccttaggagagggcaggggagaaacaggccccatgctgggaggggaaggagtgataagccaaagaatagggacagggtggtggccaagcagcctgagaccagctactgctgggggcccagctcccaatgggggagggacagagagaccccatgggggtccccaaagttgcatatttaacatggtttgcatatatggtgtccacctgccttgtggcagggtcctgtgctttgtgggtacctgtgggggcaccttggcccacccccaagtggggcggggacttggcgggagggcttccctgctgtgtccgaagggtgggccagagacctcaccttgcatagctggaagctgggtcagggcccagggccccagcgcccgctcccactcccggggctgtgcccctgccaggtgggccacatagggccttgatggagtgggcagggcactggggggcccagaggccgcgggacggccgctgctgctgccctctgtgcgacctggcatctcacgctcctgaggtggggaaggggcgctggcacccacagcaggtaccacgcccactcaggcagctcaatactgcgtgtggtctctctccccgtgagggagtgagttcaagtacgagaggagtccggaggcctcagagggcagtcggagcgccaggccgcggggctggccgtgtgctgccctgcctctgagaagtccctcagtccatgttggtgctgaccgagcgggagatgctgagcgtctgtgcggagacggagatgtcctcgtggtccacagggctgtggtagtcggaggtgatgtcggggtcgaacagcggcacttgcacggcgcccaggctggccgaggtgccagagcgcaggcagcgcgaatagaagcccaacagcaggtccagcttgtgctcgatggactgcacctgcttctccaccttgaccacgcgtcccatcatgctgatttcatccaccacctccgcgtcggagggccccttgtcgcccttctcccgggccttcctgtccccgggcccccgacccacaatttggtccacccgagtttgcaggctcttgatccggcccagcatgtccaggtggcctgctgagtactgctcaatgacgtccttcacgtcgtacggtcgcagtgtctccttgaatttccttttggccaccaggaacttgagaatcctgatggagcggatgactgtcttcacagcaggcatgatgtcgtccaccgtgagctcacactggtagctcttctcctctgctacttcctctgagggggcatcctcagcagaggtgcggggtttgagtctcagagatgcccggaagcgggtgcggtcattgaagctccagctcttttgcaccttggtggggctggtggcctcacccacctgctcgctgcttggggaggtgggcattgttggaggtgccagatgctgcttggaaggacccgtccgccgctgggagctgcccatgcggatgcggtctttgatgcccatccggctgctttccccagggcagaaggaggtgctgcccggccggtggcaggtggcaacgggcgggtaacgggagggtgctccgtcgggtaccggcgcccgccgcacctccaggggccgtaggcccccattgcgggcccgttgcacgtgctcaaacaagagggccagctctctgaaggatgggaggatactgtcatagtagtaccaggtggctgtcaggtaggcccggctcatatcggtggagtacaggcgccaggcagcctggatgaggttggctgccggcatcctccgcttctcgaagtgcttctgccggtgctgctcctggaccttcagggcaaagccggagcctaggatgccggcaggcagggcaaagaaagagatgcccagtaaggcgaagccagcagccaggaccctgcccagccatgtgtgcggtgtcttgtcaccatagccgatggttgtcaatgtaatcgtcccccaccagagcgagtcggcgtaggaggagaagtcggagttggcgtccttctcagccaggtagaccaggaaggaggcgaagatgagcaccaggaacccgatgtaccaggcggtgatcagctccttgctatgcgcgtagaccactgagcccagcagcttccaggtgccgccgcggcggtccatgcgcaccatgcgcaggatctgcaggaagcgcatgctgcgcagcgcggacgtggcgaagatgttgccctgggtacccgcggcgatgacggccaccgaggccacgaacacgatgaagtcgatgacacagaagggctttctggcaaagcggaagcgaccctgccatcctcggtagcggcagcagcatccggcggaccagacccggacgatgtactccaagccgaaaaccacgatcatcacgaattccaagatgaggagacactcgttggcaagttcctggtgctcctggatagtggacagcacagacagcaccaggcagctgaagaccagcaaaaatatgaagacgtggtagacgaaggcccagccgcggggccgctccagcacgttgtagacccagttctgcaggcggcggtagcgcttgtgcgcggccgaggagcgctggccgcaggcggagcccgagccggagcccggcccagggaggggcgcgcccggcggcagggggctgcccaggaggccgaggcggcgcggggagccgcccccgcccgcctcgccctgttcgctctgcacggccgtgagcgccactagctccgcgcggggggcgtccccgggcgggggacccaggccgaggcggcgcgggggggcctcggccatgggcggcgccgggctgggggcgccggggcccgggcacggtccggggcgggggcgcgctcggggcgctcagagacgcatggctcggacccggggccagaggggcgacccggggcgggcgcgggcggcgggggctaggggccgggccggggccgcgggcgggcgctcggagcctgggggccgccggagcccgcactgacctcccgcttccccggcgactggggctgctctttccgactccaactctcttattacgcgctccatgccgctcgcctttccacctgccaccggcgcgcgccgctcacatgtc

SEQ ID NO: 319 - DNA, 2087 bp, Homo sapiens
agcatctggaaactcggtgtgttctgatgtctgctggcgaatagcgaattgacaccagagcaagttatttctcaggtatacggttgtttcatccttgtaaatagttccaaagggaaacagtgttttattttaaggagtactttcaaacctattatatgagggctgctgagtactcagcacctgtggtcagaggcctagtgatctgtttgctgtcattctctgctttttccttggtgctttctggaggacagcaggttgaggatgaaggaagggtcagttccaggctcagctgtggcctttagtcagctgcagatcaatttgatgggtaattcaggggaaaaaaaaagttgacctgggtcatgcttggtgacagccagaacaagaccaagatgatacagtgataccgtcataatcccagatttaatataattttcataattgcatattagtactcgagacactatagctagaaaaacagcccctaataagtcattttgcatcaaatgtactaagcagagatcatttttcatgattcctcagtggtcctaacaattatgttcattgaaagtactgtcgtgaatgtaattgggactcaggcacgggaggaaaaataccctaagcttggttttttcttcttttcttcttttagagtttgcagattttgaccaacagacatggttaataagactatgcttttttaaagcctatattttatatttattttattttttaattttgttagtgacagggtctcactttattgcccaggctgtaactcgaactcctgaactcaaatgatcttcccaccttggcctcctgaagtgctggaattacaggtgtgagtcaccacgcctggcctaagagtatactttaaacaaattttttaaaatgtgtgttgatacattttatagatgttcatttaatacactactgttttaggaaagcgattgcagctcagttttctgaaatctggcaacaaatgtgtggatatattagagatattatttgtttttattaaaatatattccatgtgcctttgatatctttttgataggaagacatcttacacacacacacacacacacacacacacatatatatatatggagtaacaatttgtcgattctagtcaactgcctttgactacctgggtcaagcaatttcccaccagataaaacaacttttcaaagccttccttctgcttcccttactttccagcctgtatccttagtacgtaatttgtaaacattgtcacgaagggtcctgatgctttaatatatgcagactaaaaggatatgcaaaattaaccacatctaaaagtgaccaaagcaagtctactcccttgtaaaattatagaaaggtttgcctttcagtacattagatctgcagctacattagttgtttctgcgtctttagattttgcaaaagggaactgaaatccagcaagtcgtattaggagcccattcagaaaatgaacaaaaaagcaaaagaaaatgacccagaatgaggtggtatatttttcactttgcgttttgtagacataagtcccttctttataatttgcaattttttctgagaggtgatggattttcacttcagaggcaaacaatatcatgacaagacagccacaggagcctgaaatgaagctcaaaaggtacagccctaggggaccatgcagagtttcaaaaggttttccaaaagcattgtacatgaagaaggctgtccccaccatggttaacacaataaggatggcagagaagagaatgacattgacgtggatgctcactgggattgctttgagcaaatctggaaaaaatgagaaccgaaagggccttgctcccaacccacactgcctcacaccctctccgtggaaaagcccgtactgcatttcacccataaacttgtccagctcctgccctgaggcattgacgagcagagctcccgttttgcagaggacagtggctttgatccacaacggtgtccccaaggctgtcacaactccgagggcacatgcaaaactgaacactccggccatgcaaaaaatgattttcttctgttggcttggcatgatgagaaacggcttctgt

SEQ ID NO: 320 - DNA, 1248 bp, Homo sapiens
tgcgtgaaacttggtgaatctttattaaactagggtccaccccaggaggacggctggggcggggacagggtctcccgctgcaggctgcgcggaggcaggaggcacggggtggcgtggggtcgcatggctgcaggcttcggcgttcagtgattgtcgctgggcacaggggcggcgctggtgcccacggcagcctgcaccttctccaccagcccggcccactggcgctgcatgtcttccaccaggggctcgaaccagctcttgaggcgggcctggaaggcctcggcctgcaggcgtatctgctgggcctgctcctccagcttggcgcgcacctccgccacctgctccttcacctcgtccaggcggtcgcgggtccggctgcccatctcctccatccgcgcgcgcagccgctcgccccaggcctgggcccgctcctgtagcggctggccggccagggagcccacagtggcggcccgcacgcggccctgttccaccaggggccccaggcgctcgcggatggcgctgaggccgcgctcggcgccctcgcgggccccggcctggtacactgccaggcgcttctgcaggtcatcggcatcgcggaggagccgcttacgcagcttgcgcaggtgggaggcgaggcgcacccgcagctcctcggtgctctggccgagcatggcctgcacctcgccgcggtactgcaccaggcggccgcacacgtcctccatgtccgcgcccagccgggcctgcgccgcctgcagctccttggacagccgtgcccgcgtctcctccgccaccggggtcagttgttcctccagttccgatttgtaggccttcaactccttcatggtctcgtccatcagcgccctcagttcctgggtgacctgggagctgagcagctcctcctgcacctgctcagacagtgtctgcacccagcgcaggtaatcccaaaagcgacccagtgccagttcccagcgctggccgctctgccactcggtctgctggcgcagctcgggctccggctctgtctccaccgcttgctccaccttggcctggcatcctgccaggaatgtgaccagcaacgcagcccacagaaccttcatcttcctgcctgtgattggccagtctggaggccaggggttcccagggtcccagctctttctagaggcccctgagctcatccccgtgcccccgactgcgcttctcaccggctcctggggaaggacgtccttcacctccgctggggctgagtag

SEQ ID NO: 321 - DNA, 843 bp, Homo sapiens
tttcagctcagagagaagctttattcctcagggccctcctcagggcaggggcagtaggcaggaaggctcagctctcaaactttttcttgcggccctccattccactcagtgcatcgatgttcttgcgccagtctcccacctcccggttttccttctcggtgtcctccttcttcacctgcttgaggtgggcccgcaggtccagggactccttagcccgggcccccagcagcgcctgcatcatggcatctgcagagatcctcactctccgcagggtgggccgcttaaacttgcctcgaaggtcaaagatcttctgagtcagatctgcaatctccgtgatgttcttggtgacttttgcctctatgtcgtatctctcttcatccaccttgtccacacgggcgtggagctgtcggcacaagtcctgcagctccgcgaagcccagcccggccaactccagcggctggcagcgggtgctcagagcgcgccccttctctccgcgccgctcctccgcctctcgctccagctcttgctttgcaatctgcagcagcagagtcttcagctgcaattttctcgaggcggagatcttagattttttcttggcgtgcggctccgtggcataagcgcggtagttggaggagcggcgtctgattggggctggtgcagggcgaggttccctagccgcatcgctgctcccatccgccatgctgagactcaggccgggaatggcaggaggcagggcgaggacaggggcgtttggagggtcagtgagggggccgcccgggtgaccttcagggtcccagggaccgtcagtctcctccgggctgcttgagactccccgaggacact

SEQ ID NO: 322 - DNA, 2210 bp, Homo sapiens
aacgagtatttgtatttattaaactcattagtttgggcagtatactaaggtgtggctgtcttggattcagatagaactaagggttcccgactctgaatccagagtctgagttaaatgtttccaatggttcagtctagctttcacagtttttatgaataaaaggcattaaaggctgaagtagtctgggatttttatctattaagctaaccatttgattcaggctgttgtaggacatgttcttcagtgtggacagctgtatggctgtgactggatcagtgtcctgctggtgtacacacaggtgaggacctggctggcgaagcatccccattaggaagcaggttaggaatgtgcttcatccctgttttccaaggcccaataaggatccatgtgatctttgagtgtagtgtgtatgttggttggtgattgttccaaaggttctttgaggtgattttcggggatctctggcatatccgtcaggttaaactccacagttttcctcctcacttgagatacttctgggtgctccatcaaggccccatcgctctctgagagcaattcaaaacttttcttggccccagaactcacagtctttaagcttttgtctttggtgtctatgcctgtgacactgtgaagctttgacggcgctgatggttctagggggaagaacatgggagtggggctgaggggcgtctgtggggcactgtagtagcctggcctctgatacagtggggcagacttgaaggcgtccacagccttaagcttccaggccttgttgtcttcctggcccctaacgttctgtttggctgccttgtggtttttgggcaggccctcgtggagaagggattccctcttgggccacagtagtttggtccttgagtttgccctgggaggatggtgatcatgggactgcaggcctaggaagcggccaatgatgccagcgtgagcatcctcctcgtcctcctgattgggctggaactccatctcctctttgttcaggctgatgttgaaggtggagcccataaaggaggctcgacggaactgggcggaagcagctgtgtaggggggctgtggctcgggcttattccagtacatgtccggctccatccgaggcaggtcctggtgcatctcatccacagccaacagggacacctgcaaattcctgtcgacaatccagttggtctcaaaatcatcatcatcctctccaaaggggttgatgagctgctctgccaccttcagccagccaacatagaagaagaactgcaggaacgtgaagacgggcacaacgaggtccagctcatggccagggtaggccttggctgggttcagaaactgccgcccaactagacaagtcaggaagaagctgtacaccgccacagtcaccacctgtgtatacaccagtgggatactaatccagtcgtaggcatacaggtgtccacactgagtacgcaaggtgttcatctcgttcagcaggctctggagcaggatagggtcccggattcgacctccaagccacgccttcattgacaggttggcaaaccacacccagggcacccagaacatgttgtgtggtaggctcagtttctccaactgcttgtgttctgccggagtcataaagcctgcttgcaccaggtgctgggcgctggggaagcgcttgtagactgcggtgctgacgctgcgcaggatgagcacgttgcccaggttggcgtagcggatgagcgtgcgccgcagcagccggccttgctcgtccttgccttcgacgaagcccgacaccaggctcatgaggcggtcgggccacggcaggttctcgtactggttccaccagcgggtcacgaccagcgtcacgtagaagcccagcacgaaggaaatggggatgagctggatgtagctgtcgcaatacagagtcagtttctcaaacatcagctgttgttcttccgtgagggccagcctataaataaagcggatgatgtagtagcagagcaggaagattaagaactcgccatatagcagcttgtagatgctgccccgccagcacagcagcaggcgggagaaggagcctaagcgggcattagccacttggcttgtgtaagtgatggtcatggccaggcagtgggctgcagcaggtgggcttgggtcaggtggggttccaggtgggtccgatgatcccacagaaggtctggcgactaggctggtgggactccctgggactctgt

SEQ ID NO: 323 - DNA, 4217 bp, Homo sapiens
tgagttctctgtgactgcacttatcttttattgcccaataaacattgggaagacatagcaggccagaaaggcctgtccccagacattgtttcttgaggccaccctccttttaccccaaagatccaggggcttccttcaggagccctgtggaccagtctgtgcaacacccactcaggactgcccgacaactgccctgctgatcccccatcgcagcacaggagacacacttgtcacacatacatccaacagtagggaggggtttccccaacttccctccaggctcctggcacggggctggcatccggttgtacctggccatccccaggagccagcctggtcactgaggcactcgcacctccaggcggcactcacaccgtgcctcgccctgtaagttggtggccctgcagacatagatgcccccgtcaaaggggcagggctttctaatctccagagtcaacactccctgcttgctgaacatgcggaagcgggcgtcttctcccaggtccaggccattcttgaaccaggaaatcttgggcttggggctaccccggacagcacagcagagcatagcagtgtagcccgcgatgaccgagcggttcaccaggggctgggtgaagcttggggcctcggagaagtccagggccttatagttgggtggctcataggtgatgcctggtctggggataaagacgggctccttggtggtggccgctctgtcactaaagccaaccatattctggctgaagacgcggaagtagtagccattgccaatgatgagctctggcaccacgcagtgggtgcggcggtaatgctccaagacggtgaaccactccatggtcttcttgtcggctttctgcactgtgtacccccagagctccgtgttgccgacatcctggggtggcttccactccagagccacattaagaccccaggcgtcagtcacccggagatcctggggaggacttggcttgtcaacaacctgcagcaccagcgtggccttgtcctccatgttctcaatgcgcaccgtcacctggtaagtgcctgaatgcacgcggcgagcggcccggatgaacaggatggtgtctgtggggctgttgcggatgctcacctcctcgcctgccaggggctgcccctctttggtccaggtcacctgaggccggggcttgccctggaaagggatgagaaggttcacaggctccccgaccttcttctgaatggtctggcgcaggtgcctgggcagctgaagccgtggccgttgcaggatctcctgcactgtcaccggctccgtggtggtaacaggggctccaggccctgccatattgtgtgcccgcactcggaaaagcagccgggcccccgtgggcaggtccttcaccagtatcgatgtgtgctctgtcagcccctgcagggcagccacccactctgagcagccctctgggcagtactccacgctgtagccatccaggcctcctgctcccacgcgctctgggggccgccacttgagggagaccgtggtgtcagagacgtcctctactgccaggtgggtgggttcgctggggggaccgataggcatgaagggctgggaggcagggctgggcctggacatgccgatggcgttgaccgcgtagacgcgcatctcgtacaccacgccctcgatcatgcgccgcgcttcatgactcagctcctgaatcaggtcgaagttcagccgcatccaccggtagctcttcttcttcttgcgctccaggatgtagcccaggatgggctgcccgccatcgtaggcaggcggctcccactgtactgtgcaggagtcctctcccacgttgctgatcttgggggccgcaggtgcgtctggcacgtcgatgaccttgactgtgaggttgacctggtcctcgcccacagggttcttcactgtgaccgtgtagacgccctcatcttccttctctgccccctcgaccgtgaagatgctgcggtccttggtggtctccacgcggacccggccctcggtctcacacagcagcttcttgtcaaacacccactcatcgctgtcacctgtgtcctctggggcatctggggctggcctggctggggccttattcccctgcgtgatagccttctgccagatcacagtgggagcagggtccccagagatagggacgtccagacgtagcttatttccagctacaaccacaatggtgtctggtatgcggcctgggcagtccaggtggatcttgggaggttcctgcctgggtacgaagtcaatcttgacctccatgaagtggagcttggctgacaggttgcaggcgaagccctcgggcacaaagctgtagtcagcctcgtcggcaggtgtgacgtcgtcaatggtcagtttgtggacccgcccgatgtgggacacctttatgcggctgtcgggcaccagctccttcccattcttcagccacacaccccgaacattctcatctgagacctcacatttgaacaccgcctggtcctttgcgcccaccatcaggtctgcgatgctctggtacacctccagcttcttttcctgcacaatgagctcagccagcgcctggcccccgctagtgcacagtgcatagtgccccgcgtcctccagcatggcctcgttgatgatcaggtggtgtctctgcccgtccttcttgaaccggtatttgaaggtctcctcccgggtcagctccaccccgtccttcagccatttgacttgcgccccctcctccgatacttcacactcaaactccacccgctgccccaccatcaccagctggtcctccaaggggcgcgtgatgagcacagggggctctttcacaaagagctccgtgctacacttctcgccacccaccacgcactggtaggctgcgtcgtccgccaatgagcactggctgatggtcagggtacgcttggcaccgatggactcaaagatgtacttgctgccgctcatctggatctcctggccattcttgagccatttgacctcagcgtcatggtcagccagttccacggtcagccggatcttgtggcctttgctcacctggtaggccggctccagcttcttctgaaaggctgtgctcttcttctcatcgcgcctcatgcccttgagcctctttagcatgccgcgcaggtcagtgacgccgtactggaaggcgatgcgctcgtactcagatgggggtgcctgccgtaggatctcccacacgtcctcctctgctggtgcctccagcttcgagtccctcggggtccggaaactgtctctctttttcagcagtgagctgaagtccagaatcccagtgtcctcatggctatcactgatccgccgaccacctccagccaggctcgtgcggcggaaggctgataggaggtccaggtctccggtgcccatggcctcgtggacagtgagattgaagttggagcagtcaaatttgtccttggtggacacctcacagcggtagctgccagtgaaggcaggctgggcatcggtgatgtgcagctcgaacagatagaccttgctggcgcggtcgtagctgtcgtgcagctgcaggtgctggcccaccttgctgctcaggtccacccatttgcccttgaaccacttgaccacaggcggcttcaggaggctggcgccggccacgcgggctgagaaggtgatgctgccacccacggtcacctcgccatcctgtggccgcatcacgaagaggccaatggggtcatcgggggctccaggggtaggaccattgagagctgctgagcttgaccctttgggacttggggcactttctcccagctcagcggctggggccggggcttctccaggggctccagtggcctcagcaggggcaggggcaggggccagcatgggctctgccttctctgcctctatgaccttgaggtcgaacttgaccttggaggagccagcaatgactgcgtaagatccctggtcggcagggcccacttcccgcactgtcagcgtatgccgtgtgccctctgtggccaggccgtacttgttgctggcgctgatgtcactgcctccgcgctgccagcgcaccttcactcctgcccgctctgtctcggcctcgaacacggcagggctgcctgcggccacttccactgaccgtggcttcttgctaaaagctgagactggcttcttccccggctcaggcatcctgagagacgtcacaccaggcacgaagcaggcacaggtcacccaaagagggact

SEQ ID NO: 324 - DNA, 1362 bp, Homo sapiens
tcagtgtgtggtggctttttattactggtgtggagtgggtgtgggggcaggcaggagtggtggctcccacctaggccagctccccatttccaaacaggagctgcctggggtgcccaggagggcccgggaactgggggagtgcaggccggaggcaggtgcgagcgaggagcagatctttggtgaaggaggccaggctctatttccagcgcccggtgactttagccttcccgcgggtcttggagactttctggttatcgttgatcctgtttcggagaacattgatctcatatttctgctgcttgaacttctcctgcaggtcgaacttctctgcctccaagttatagatgctctgccacagctccttggccttctccctcagctgatcttcattcaggtggtcaatggccagcaccttcctcctctcagccagaatcttcttcttcttttcccgctcagtctgcctcttcccacttttccgctctgtctgggcctgcttctggatgtaacccccaaaatgcatcatgttggacaaagccttcttcttccgggcctcatcctcagccttcctcctgttctcctcctcctctcgtcgagccctctcttcagccaggcggttctgccgctccttctcccgctcattccggatgcgctgctgctcggcccgctctgcccgacgtctctcgatcctgtctttgagagaaacgagctcctcctcctctttcttcctgttctcaaagtgagcctcgatcagcgcctgcaactcattcaggtccttctccatgcgcttccggtggatgtcatcaaagtccactctctctccatcggggatcttgggaggcaccaagttgggcatgaacgacctgggctttggtttggactcctccattgggccatcttcagcctcctttgcttcctcttcttcttcatcttcttctgccctggtctcctcggtctcagcctctgcttcagcatcctcttccgctgcctcctcctgctcgtcttcgtcctctctccagtcctcctcttcttcaacagctgcttcttcctgctcctcctcctcgtactcttccaccacctcttctatgtcagacatggtctctgctctccctccaaaaggagaaaaaagtcagtgcaggtacaaagggaagcctgccttcctcagaagagctctggcccccgttgtacagagatcagcgaggcctagggtgaatctagttccacccctcatgagctgtgtgacctcagaacagcagctgccgacagatcctggaggcgtctgctcagtctcagcggggactgggtgaggcagaggatggagagggctttaagcaggcatgtgggctggggcctggtgagccagcc

SEQ ID NO: 325 - protein, 128 aa, Artificial Sequence
  RNAse1
KESRAKKFQRQHMDSDSSPSSSSTYCNQMMRRRNMTQGLCKPVNTFVHEPLVDVQNVCFQEKVTCKNGQGNCYKSNSSMHITDCRLTNGSRYPNCAYRTSPKERHIIVACEGSPYVPVHFDASVEDST

SEQ ID NO: 326 - protein, 119 aa, Artificial Sequence
  RNAse4
QDGMYQRFLRQHVHPEETGGSDRYCDLMMQRRKMTLYHCKRFNTFIHEDIWNIRSICSTTNIQCKNGKMNCHEGVVKVTDCRDTGSSRAPNCRYRAIASTRRVVIACEGNPQVPVHFDG

SEQ ID NO: 327 - protein, 127 aa, Artificial Sequence
  RNAse6
WPKRLTKAHWFEIQHIQPSPLQCNRAMSGINNYTQHCKHQNTFLHDSFQNVAAVCDLLSIVCKNRRHNCHQSSKPVNMTDCRLTSGKYPQCRYSAAAQYKFFIVACDPPQKSDPPYKLVPVHLDSIL

SEQ ID NO: 328 - protein, 155 aa, Artificial Sequence
  RNAse7
APARAGFCPLLLLLLLGLWVAEIPVSAKPKGMTSSQWFKIQHMQPSPQACNSAMKNINKHTKRCKDLNTFLHEPFSSVAATCQTPKIACKNGDKNCHQSHGPVSLTMCKLTSGKYPNCRYKEKRQNKSYVVACKPPQKKDSQQFHLVPVHLDRVL

SEQ ID NO: 329 - protein, 122 aa, Artificial Sequence
  RNAse8
TSSQWFKTQHVQPSPQACNSAMSIINKYTERCKDLNTFLHEPFSSVAITCQTPNIACKNSCKNCHQSHGPMSLTMGELTSGKYPNCRYKEKHLNTPYIVACDPPQQGDPGYPLVPVHLDKVV

SEQ ID NO: 330 - protein, 134 aa, Artificial Sequence
  RNAse2
KPPQFTWAQWFETQHINMTSQQCTNAMQVINNYQRRCKNQNTFLLTTFANVVNVCGNPNMTCPSNKTRKNCHHSGSQVPLIHCNLTTPSPQNISNCRYAQTPANMFYIVACDNRDQRRDPPQYPVVPVHLDRII

SEQ ID NO: 331 - protein, 216 aa, Artificial Sequence
  RNAse6PL
DKRLRDNHEWKKLIMVQHWPETVCEKIQNDCRDPPDYWTIHGLWPDKSEGCNRSWPFNLEEIKKNWMEITDSSLPSPSMGPAPPRWMRSTPRRSTLAEAWNSTGSWTSTGGCALPPAALPSGDLCCRPSLTAGSRGVGVDLTALHQLLHVHYSATGIIPEECSEPTKPFQIILHHDHTEWVQSIGMPIWGTISSSESAIGKNEESQPACAVLSHDS

SEQ ID NO: 332 - protein, 722 aa, Artificial Sequence
  RNAseL
AAVEDNHLLIKAVQNEDVDLVQQLLEGGANVNFQEEEGGWTPLHNAVQMSREDIVELLLRHGADPVLRKKNGATPFILAAIAGSVKDLLKLFLSKGADVNECDFYGFTAFMEAAVYGKVKALKFLYKRGANVNLRRKTKEDQERLRKGGATALMDAAEKGHVEVLKILLDEMGADVNACDNMGRNALIHALLSSDDSDVEAITHLLLDHGADVNVRGERGKTPLILAVEKKHLGLVQRLLEQEHIEINDTDSDGKTALLLAVELKLKKIAELLCKRGASTDCGDLVMTARRNYDHSLVKVLLSHGAKEDFHPPAEDWKPQSSHWGAALKDLHRIYRPMIGKLKFFIDEKYKIADTSEGGIYLGFYEKQEVAVKTFCEGSPRAQREVSCLQSSRENSHLVTFYGSESHRGHLFVCVTLCEQTLEACLDVHRGEDVENEEDEFARNVLSSIFKAVQELHLSCGYTHQDLQPQNILIDSKKAAHLADFDKSIKWAGDPQEVKRDLEDLGRLVLYVVKKGSISFEDLKAQSNEEVVQLSPDEETKDLIHRLFHPGEHVRDCLSDLLGHPFFWTWESRYRTLRNVGNESDIKTRKSESEILRLLQPGPSEHSKSFDKWTTKINECVMKKMNKFYEKRGNFYQNTVGDLLKFIRNLGEHIDEEKHKKMKLKIGDPSLYFQKTFPDLVIYVYTKLQNTEYRKHFPQTHSPNKPQCDGAGGASGLASPGC

SEQ ID NO: 333 - protein, 217 aa, Artificial Sequence
  RNAseT2
VQHWPETVCEKIQNDCRDPPDYWTIHGLWPDKSEGCNRSWPFNLEEIKDLLPEMRAYWPDVIHSFPNRSRFWKHEWEKHGTCAAQVDALNSQKKYFGRSLELYRELDLNSVLLKLGIKPSINYYQVADFKDALARVYGVIPKIQCLPPSQDEEVQTIGQIELCLTKQDQQLQNCTEPGEQPSPKQEVWLANGAAESRGLRVCEDGPVFYPPPKKTKH

SEQ ID NO: 334 - protein, 183 aa, Artificial Sequence
  RNAse11
EASESTMKIIKEEFTDEEMQYDMAKSGQEKQTIEILMNPILLVKNTSLSMSKDDMSSTLLTFRSLHYNDPKGNSSGNDKECCNDMTVWRKVSEANGSCKWSNNFIRSSTEVMRRVHRAPSCKFVQNPGISCCESLELENTVCQFTTGKQFPRCQYHSVTSLEKILTVLTGHSLMSWLVCGSKL

SEQ ID NO: 335 - protein, 185 aa, Artificial Sequence
  RNAseT2-like
  misc_feature (1)..(1): Xaa can be any naturally occurring amino acid
XLGGADKRLRDNHEWKKLIMVQHWPETVCEKIQNDCRDPPDYWTIHGLWPDKSEGCNRSWPFNLEEIKDLLPEMRAYWPDVIHSFPNRSRFWKHEWEKHGTCAAQVDALNSQKKYFGRSLELYRELDLNSVLLKLGIKPSINYYQTTEEDLNLDVEPTTEDTAEEVTIHVLLHSALFGEIGPRRW

SEQ ID NO: 336 - protein, 128 aa, Artificial Sequence
  RNase1(K41R)
KESRAKKFQRQHMDSDSSPSSSSTYCNQMMRRRNMTQGRCRPVNTFVHEPLVDVQNVCFQEKVTCKNGQGNCYKSNSSMHITDCRLTNGSRYPNCAYRTSPKERHIIVACEGSPYVPVHFDASVEDST

SEQ ID NO: 337 - protein, 128 aa, Artificial Sequence
  RNase1 (RNase1(K41R, D121E))
KESRAKKFQRQHMDSDSSPSSSSTYCNQMMRRRNMTQGRCRPVNTFVHEPLVDVQNVCFQEKVTCKNGQGNCYKSNSSMHITDCRLTNGSRYPNCAYRTSPKERHIIVACEGSPYVPVHFEASVEDST

SEQ ID NO: 338 - protein, 128 aa, Artificial Sequence
  RNase1 (RNase1(K41R, D121E, H119N))
KESRAKKFQRQHMDSDSSPSSSSTYCNQMMRRRNMTQGRCRPVNTFVHEPLVDVQNVCFQEKVTCKNGQGNCYKSNSSMHITDCRLTNGSRYPNCAYRTSPKERHIIVACEGSPYVPVNFEASVEDST

SEQ ID NO: 339 - protein, 128 aa, Artificial Sequence
  (RNase1(H119N))
KESRAKKFQRQHMDSDSSPSSSSTYCNQMMRRRNMTQGRCKPVNTFVHEPLVDVQNVCFQEKVTCKNGQGNCYKSNSSMHITDCRLTNGSRYPNCAYRTSPKERHIIVACEGSPYVPVNFDASVEDST

SEQ ID NO: 340 - protein, 128 aa, Artificial Sequence
  (RNase1(R39D, N67D, N88A, G89D, R91D, H119N))
KESRAKKFQRQHMDSDSSPSSSSTYCNQMMRRRNMTQGDCKPVNTFVHEPLVDVQNVCFQEKVTCKDGQGNCYKSNSSMHITDCRLTADSDYPNCAYRTSPKERHIIVACEGSPYVPVNFDASVEDST

SEQ ID NO: 341 - protein, 128 aa, Artificial Sequence
  RNase1 (RNase1(R39D, N67D, N88A, G89D, R91D, H119N, K41R, D121E))
KESRAKKFQRQHMDSDSSPSSSSTYCNQMMRRRNMTQGDCRPVNTFVHEPLVDVQNVCFQEKVTCKDGQGNCYKSNSSMHITDCRLTADSDYPNCAYRTSPKERHIIVACEGSPYVPVNFEASVEDST

SEQ ID NO: 342 - protein, 128 aa, Artificial Sequence
  RNase1 (RNase1(R39D, N67D, N88A, G89D, R91D))
KESRAKKFQRQHMDSDSSPSSSSTYCNQMMRRRNMTQGDCKPVNTFVHEPLVDVQNVCFQEKVTCKDGQGNCYKSNSSMHITDCRLTADSDYPNCAYRTSPKERHIIVACEGSPYVPVHFDASVEDST

SEQ ID NO: 343 - protein, 128 aa, Artificial Sequence; identical to SEQ ID NO: 341
  Rnase1 (R39D, N67D, N88A, G89D, R91D, H119N, K41R, D121E)

SEQ ID NO: 344 - protein, 299 aa, Artificial Sequence
  NOB1
APVEHVVADAGAFLRHAALQDIGKNIYTIREVVTEIRDKATRRRLAVLPYELRFKEPLPEYVRLVTEFSKKTGDYPSLSATDIQVLALTYQLEAEFVGVSHLKQEPQKVKVSSSIQHPETPLHISGFHLPYKPKPPQETEKGHSACEPENLEFSSFMFWRNPLPNIDHELQELLIDRGEDVPSEEEEEEENGFEDRKDDSDDDGGGWITPSNIKQIQQELEQCDVPEDVRVGCLTTDFAMQNVLLQMGLHVLAVNGMLIREARSYILRCHGCFKTTSDMSRVFCSHCGNKTLKKVSVTV

SEQ ID NO: 345 - protein, 210 aa, Artificial Sequence
  ENDOV
AFSGLQRVGGVDVSFVKGDSVRACASLVVLSFPELEVVYEESRMVSLTAPYVSGFLAFREVPFLLELVQQLREKEPGLMPQVLLVDGNGVLHHRGFGVACHLGVLTDLPCVGVAKKLLQVDGLENNALHKEKIRLLQTRGDSFPLLGDSGTVLGMALRSHDRSTRPLYISVGHRMSLEAAVRLTCCCCRFRIPEPVRQADICSREHIRKS

SEQ ID NO: 346 - protein, 249 aa, Artificial Sequence
  ENDOG
AELPPVPGGPRGPGELAKYGLPGLAQLKSRESYVLCYDPRTRGALWVVEQLRPERLRGDGDRRECDFREDDSVHAYHRATNADYRGSGFDRGHLAAAANHRWSQKAMDDTFYLSNVAPQVPHLNQNAWNNLEKYSRSLTRSYQNVYVCTGPLFLPRTEADGKSYVKYQVIGKNHVAVPTHFFKVLILEAAGGQIELRTYVMPNAPVDEAIPLERFLVPIESIERASGLLFVPNILARAGSLKAITAGSK

SEQ ID NO: 347 - protein, 479 aa, Artificial Sequence
  ENDOD1
RLVGEEEAGFGECDKFFYAGTPPAGLAADSHVKICQRAEGAERFATLYSTRDRIPVYSAFRAPRPAPGGAEQRWLVEPQIDDPNSNLEEAINEAEAITSVNSLGSKQALNTDYLDSDYQRGQLYPFSLSSDVQVATFTLTNSAPMTQSFQERWYVNLHSLMDRALTPQCGSGEDLYILTGTVPSDYRVKDKVAVPEFVWLAACCAVPGGGWAMGFVKHTRDSDIIEDVMVKDLQKLLPFNPQLFQNNCGETEQDTEKMKKILEVVNQIQDEERMVQSQKSSSPLSSTRSKRSTLLPPEASEGSSSFLGKLMGFIATPFIKLFQLIYYLVVAILKNIVYFLWCVTKQVINGIESCLYRLGSATISYFMAIGEELVSIPWKVLKVVAKVIRALLRILCCLLKAICRVLSIPVRVLVDVATFPVYTMGAIPIVCKDIALGLGGTVSLLFDTAFGTLGGLFQVVFSVCKRIGYKVTFDNSGEL

SEQ ID NO: 348 - protein, 380 aa, Artificial Sequence
  hFEN1
MGIQGLAKLIADVAPSAIRENDIKSYFGRKVAIDASMSIYQFLIAVRQGGDVLQNEEGETTSHLMGMFYRTIRMMENGIKPVYVFDGKPPQLKSGELAKRSERRAEAEKQLQQAQAAGAEQEVEKFTKRLVKVTKQHNDECKHLLSLMGIPYLDAPSEAEASCAALVKAGKVYAAATEDMDCLTFGSPVLMRHLTASEAKKLPIQEFHLSRILQELGLNQEQFVDLCILLGSDYCESIRGIGPKRAVDLIQKHKSIEEIVRRLDPNKYPVPENWLHKEAHQLFLEPEVLDPESVELKWSEPNEEELIKFMCGEKQFSEERIRSGVKRLSKSRQGSTQGRLDDFFKVTGSLSSAKRKEPEPKGSTKKKAKTGAAGKFKRGK

SEQ ID NO: 349 - protein, 372 aa, Homo sapiens
MESGQPARRIAMAPLLEYERQLVLELLDTDGLVVCARGLGADRLLYHFLQLHCHPACLVLVLNTQPAEEEYFINQLKIEGVEHLPRRVTNEITSNSRYEVYTQGGVIFATSRILVVDFLTDRIPSDLITGILVYRAHRIIESCQEAFILRLFRQKNKRGFIKAFTDNAVAFDTGFCHVERVMRNLFVRKLYLWPRFHVAVNSFLEQHKPEVVEIHVSMTPTMLAIQTAILDILNACLKELKCHNPSLEVEDLSLENAIGKPFDKTIRHYLDPLWHQLGAKTKSLVQDLKILRTLLQYLSQYDCVTFLNLLESLRATEKAFGQNSGWLFLDSSTSMFINARARVYHLPDAKMSKKEKISEKMEIKEGEGILWG

SEQ ID NO: 350 - protein, 311 aa, Homo sapiens
CSPQESGMTALSARMLTRSRSLGPGAGPRGCREEPGPLRRREAAAEARKSHSPVKRPRKAQRLRVAYEGSDSEKGEGAEPLKVPVWEPQDWQQQLVNIRAMRNKKDAPVDHLGTEHCYDSSAPPKVRRYQVLLSLMLSSQTKDQVTAGAMQRLRARGLTVDSILQTDDATLGKLIYPVGFWRSKVKYIKQTSAILQQHYGGDIPASVAELVALPGVGPKMAHLAMAVAWGTVSGIAVDTHVHRIANRLRWTKKATKSPEETRAALEEWLPRELWHEINGLLVGFGQQTCLPVHPRCHACLNQALCPAAQGL

SEQ ID NO: 351 - protein, 186 aa, Homo sapiens
ESTHVEFKRFTTKKVIPRIKEMLPHYVSAFANTQGGYVLIGVDDKSKEVVGCKWEKVNPDLLKKEIENCIEKLPTFHFCCEKPKVNFTTKILNVYQKDVLDGYVCVIQVEPFCCVVFAEAPDSWIMKDNSVTRLTAEQWVVMMLDTQSAPPSLVTDYNSCLISSASSARKSPGYPIKVHKFKEALQ

SEQ ID NO: 352 - protein, 262 aa, Homo sapiens
TLQGTNTYLVGTGPRRILIDTGEPAIPEYISCLKQALTEFNTAIQEIVVTHWHRDHSGGIGDICKSINNDTTYCIKKLPRNPQREEIIGNGEQQYVYLKDGDVIKTEGATLRVLYTPGHTDDHMALLLEEENAIFSGDCILGEGTTVFEDLYDYMNSLKELLKIKADIIYPGHGPVIHNAEAKIQQYISHRNIREQQILTLFRENFEKSFTVMELVKIIYKNTPENLHEMAKHNLLLHLKKLEKEGKIFSNTDPDKKWKAHL

SEQ ID NO: 353 - protein, 518 aa, Homo sapiens
MLRVVSWNINGIRRPLQGVANQEPSNCAAVAVGRILDELDADIVCLQETKVTRDALTEPLAIVEGYNSYFSFSRNRSGYSGVATFCKDNATPVAAEEGLSGLFATQNGDVGCYGNMDEFTQEELRALDSEGRALLTQHKIRTWEGKEKTLTLINVYCPHADPGRPERLVFKMRFYRLLQIRAEALLAAGSHVIILGDLNTAHRPIDHWDAVNLECFEEDPGRKWMDSLLSNLGCQSASHVGPFIDSYRCFQPKQEGAFTCWSAVTGARHLNYGSRLDYVLGDRTLVIDTFQASFLLPEVMGSDHCPVGAVLSVSSVPAKQCPPLCTRFLPEFAGTQLKILRFLVPLEQSPVLEQSTLQHNNQTRVQTCQNKAQVRSTRPQPSQVGSSRGQKNLKSYFQPSPSCPQASPDIELPSLPLMSALMTPKTPEEKAVAKVVKGQAKTSEAKDEKELRTSFWKSVLAGPLRTPLCGGHREPCVMRTVKKPGPNLGRRFYMCARPRGPPTDPSSRCNFFLWSRPS

SEQ ID NO: 354 - protein, 350 aa, Homo sapiens
MLRVVSWNINGIRRPLQGVANQEPSNCAAVAVGRILDELDADIVCLQETKVTRDALTEPLAIVEGYNSYFSFSRNRSGYSGVATFCKDNATPVAAEEGLSGLFATQNGDVGCYGNMDEFTQEELRALDSEGRALLTQHKIRTWEGKEKTLTLINVYCPHADPGRPERLVFKMRFYRLLQIRAEALLAAGSHVIILGDLNTAHRPIDHWDAVNLECFEEDPGRKWMDSLLSNLGCQSASHVGPFIDSYRCFQPKQEGAFTCWSAVTGARHLNYGSRLDYVLGDRTLVIDTFQASFLLPEVMGSDHCPVGAVLSVSSVPAKQCPPLCTRFLPEFAGTQLKILRFLVPLEQSP

SEQ ID NO: 355 - protein, 287 aa, Homo sapiens
PKRGKKGAVAEDGDELRTEPEAKKSKTAAKKNDKEAAGEGPALYEDPPDQKTSPSGKPATLKICSWNVDGLRAWIKKKGLDWVKEEAPDILCLQETKCSENKLPAELQELPGLSHQYWSAPSDKEGYSGVGLLSRQCPLKVSYGIGDEEHDQEGRVIVAEFDSFVLVTAYVPNAGRGLVRLEYRQRWDEAFRKFLKGLASRKPLVLCGDLNVAHEEIDLRNPKGNKKNAGFTPQERQGFGELLQAVPLADSFRHLYPNTPYAYTFWTYMMNARSKNVGWRLDYFLLS

SEQ ID NO: 356 - protein, 123 aa, Homo sapiens [sequence omitted]

SEQ ID NO: 357 - protein, 136 aa, Homo sapiens
SSLIRRVISTAKAPGAIGPYSQAVLVDRTIYISGQIGMDPSSGQLVSGGVAEEAKQALKNMGEILKAAGCDFTNVVKTTVLLADINDFNTVNEIYKQYFKSNFPARAAYQVAALPKGSRIEIEAVAIQGPLTTASL

SEQ ID NO: 358 - protein, 189 aa, Homo sapiens
GGGTPKAPNLEPPLPEEEKEGSDLRPVVIDGSNVAMSHGNKEVFSCRGILLAVNWFLERGHTDITVFVPSWRKEQPRPDVPITDQHILRELEKKKILVFTPSRRVGGKRVVCYDDRFIVKLAYESDGIVVSNDTYRDLQGERQEWKRFIEERLLMYSFVNDKFMPPDDPLGRHGPSLDNFLRKKPLTLE

SEQ ID NO: 359 - protein, 598 aa, Homo sapiens
SGPCGEKPVLEASPTMSLWEFEDSHSRQGTPRPGQELAAEEASALELQMKVDFFRKLGYSSTEIHSVLQKLGVQADTNTVLGELVKHGTATERERQTSPDPCPQLPLVPRGGGTPKAPNLEPPLPEEEKEGSDLRPVVIDGSNVAMSHGNKEVFSCRGILLAVNWFLERGHTDITVFVPSWRKEQPRPDVPITDQHILRELEKKKILVFTPSRRVGGKRVVCYDDRFIVKLAYESDGIVVSNDTYRDLQGERQEWKRFIEERLLMYSFVNDKFMPPDDPLGRHGPSLDNFLRKKPLTLEHRKQPCPYGRKCTYGIKCRFFHPERPSCPQRSVADELRANALLSPPRAPSKDKNGRRPSPSSQSSSLLTESEQCSLDGKKLGAQASPGSRQEGLTQTYAPSGRSLAPSGGSGSSFGPTDWLPQTLDSLPYVSQDCLDSGIGSLESQMSELWGVRGGGPGEPGPPRAPYTGYSPYGSELPATAAFSAFGRAMGAGHFSVPADYPPAPPAFPPREYWSEPYPLPPPTSVLQEPPVQSPGAGRSPWGRAGSLAKEQASVYTKLCGVFPPHLVEAVMGRFPQLLDPQQLAAEILSYKSQHPSE

SEQ ID NO: 360 - protein, 136 aa, Homo sapiens; identical to SEQ ID NO: 357

SEQ ID NO: 361 - protein, 213 aa, Homo sapiens
EALFFPSQVTCTEALLRAPGAELAELPEGCPCGLPHGESALSRLLRALLAARASLDLCLFAFSSPQLGRAVQLLHQRGVRVRVVTDCDYMALNGSQIGLLRKAGIQVRHDQDPGYMHHKFAIVDKRVLITGSLNWTTQAIQNNRENVLITEDDEYVRLFLEEFERIWEQFNPTKYTFFPPKKSHGSCAPPVSRAGGRLLSWHRTCGTSSESQT

SEQ ID NO: 362 - protein, 382 aa, Homo sapiens
KARYKTLEPRGYSLLIRGLIHSDRWREALLLLEDIKKVITPSKKNYNDCIQGALLHQDVNTAWNLYQELLGHDIVPMLETLKAFFDFGKDIKDDNYSNKLLDILSYLRNNQLYPGESFAHSIKTWFESVPGKQWKGQFTTVRKSGQCSGCGKTIESIQLSPEEYECLKGKIMRDVIDGGDQYRKTTPQELKRFENFIKSRPPFDVVIDGLNVAKMFPKVRESQLLLNVVSQLAKRNLRLLVLGRKHMLRRSSQWSRDEMEEVQKQASCFFADDISEDDPFLLYATLHSGNHCRFITRDLMRDHKACLPDAKTQRLFFKWQQGHQLAIVNRFPGSKLTFQRILSYDTVVQTTGDSWHIPYDEDLVERCSCEVPTKWLCLHQKT

SEQ ID NO: 363 - protein, 360 aa, Homo sapiens
SVEPMFRHLKNTYAGLQLVVVILPGKTPVYAEVKRVGDTVLGMATQCVQMKNVQRTTPQTLSNLCLKINVKLGGVNNILLPQGRPPVFQQPVIFLGADVTHPPAGDGKKPSIAAVVGSMDAHPNRYCATVRVQQHRQEIIQDLAAMVRELLIQFYKSTRFKPTRIIFYRDGVSEGQFQQVLHHELLAIREACIKLEKDYQPGITFIVVQKRHHTRLFCTDKNERVGKSGNIPAGTTVDTKITHPTEFDFYLCSHAGIQGTSRPSHYHVLWDDNRFSSDELQILTYQLCHTYVRCTRSVSIPAPAYYAHLVAFRARYHLVDKEHDSAEGSHTSGQSNGRDHQALAKAVQVHQDTLRTMYFA

SEQ ID NO: 364 - protein, 327 aa, Homo sapiens
QGAEGALTGKQPDGSAEKAVLEQFGFPLTGTEARCYTNHALSYDQAKRVPRWVLEHISKSKIMGDADRKHCKFKPDPNIPPTFSAFNEDYVGSGWSRGHMAPAGNNKFSSKAMAETFYLSNIVPQDFDNNSGYWNRIEMYCRELTERFEDVWVVSGPLTLPQTRGDGKKIVSYQVIGEDNVAVPSHLYKVILARRSSVSTEPLALGAFVVPNEAIGFQPQLTEFQVSLQDLEKLSGLVFFPHLDRTSDIRNICSVDTCKLLDFQEFTLYLSTRKIEGARSVLRLEKIMENLKNAEIEPDDYFMSRYEKKLEELKAKEQSGTQIRKPS

SEQ ID NO: 365 - protein, 526 aa, Homo sapiens
EHPSKMEFFQKLGYDREDVLRVLGKLGEGALVNDVLQELIRTGSRPGALEHPAAPRLVPRGSCGVPDSAQRGPGTALEEDFRTLASSLRPIVIDGSNVAMSHGNKETFSCRGIKLAVDWFRDRGHTYIKVFVPSWRKDPPRADTPIREQHVLAELERQAVLVYTPSRKVHGKRLVCYDDRYIVKVAYEQDGVIVSNDNYRDLQSENPEWKWFIEQRLLMFSFVNDRFMPPDDPLGRHGPSLSNFLSRKPKPPEPSWQHCPYGKKCTYGIKCKFYHPERPHHAQLAVADELRAKTGARPGAGAEEQRPPRAPGGSAGARAAPREPFAHSLPPARGSPDLAALRGSFSRLAFSDDLGPLGPPLPVPACSLTPRLGGPDWVSAGGRVPGPLSLPSPESQFSPGDLPPPPGLQLQPRGEHRPRDLHGDLLSPRRPPDDPWARPPRSDRFPGRSVWAEPAWGDGATGGLSVYATEDDEGDARARARIALYSVFPRDQVDRVMAAFPELSDLARLILLVQRCQSAGAPLGKP

SEQ ID NO: 366 - protein, 475 aa, Homo sapiens
RQQQPQVVEKQQETPLAPADFAHISQDAQSLHSGASRRSQKRLQSPSKQAQPLDDPEAEQLTVVGKISFNPKDVLGRGAGGTFVFRGQFEGRAVAVKRLLRECFGLVRREVQLLQESDRHPNVLRYFCTERGPQFHYIALELCRASLQEYVENPDLDRGGLEPEVVLQQLMSGLAHLHSLHIVHRDLKPGNILITGPDSQGLGRVVLSDFGLCKKLPAGRCSFSLHSGIPGTEGWMAPELLQLLPPDSPTSAVDIFSAGCVFYYVLSGGSHPFGDSLYRQANILTGAPCLAHLEEEVHDKVVARDLVGAMLSPLPQPRPSAPQVLAHPFFWSRAKQLQFFQDVSDWLEKESEQEPLVRALEAGGCAVVRDNWHEHISMPLQTDLRKFRSYKGTSVRDLLRAVRNKKHHYRELPVEVRQALGQVPDGFVQYFTNRFPRLLLHTHRAMRSCASESLFLPYYPPDSEARRPCPGATGR

SEQ ID NO: 367 - protein, 384 aa, Homo sapiens
KLVRKNIEKDNAGQVTLVPEEPEDMWHTYNLVQVGDSLRASTIRKVQTESSTGSVGSNRVRTTLTLCVEAIDFDSQACQLRVKGTNIQENEYVKMGAYHTIELEPNRQFTLAKKQWDSVVLERIEQACDPAWSADVAAVVMQEGLAHICLVTPSMTLTRAKVEVNIPRKRKGNCSQHDRALERFYEQVVQAIQRHIHFDVVKCILVASPGFVREQFCDYLFQQAVKTDNKLLLENRSKFLQVHASSGHKYSLKEALCDPTVASRLSDTKAAGEVKALDDFYKMLQHEPDRAFYGLKQVEKANEAMAIDTLLISDELFRHQDVATRSRYVRLVDSVKENAGTVRIFSSLHVSGEQLSQLTGVAAILRFPVPELSDQEGDSSSEED

SEQ ID NO: 368 - protein, 166 aa, Homo sapiens
SLVIRNLQRVIPIRRAPLRSKIEIVRRILGVQKFDLGIICVDNKNIQHINRIYRDRNVPTDVLSFPFHEHLKAGEFPQPDFPDDYNLGDIFLGVEYIFHQCKENEDYNDVLTVTATHGLCHLLGFTHGTEAEWQQMFQKEKAVLDELGRRTGTRLQPLTRGLFGGS

SEQ ID NO: 369 - protein, 178 aa, Homo sapiens
QEVIAGLERFTFAFEKDVEMQKGTGLLPFQGMDKSASAVCNFFTKGLCEKGKLCPFRHDRGEKMVVCKHWLRGLCKKGDHCKFLHQYDLTRMPECYFYSKFGDCSNKECSFLHVKPAFKSQDCPWYDQGFCKDGPLCKYRHVPRIMCLNYLVGFCPEGPKCQFAQKIREFKLLPGSKI

SEQ ID NO: 370 - protein, 384 aa, Homo sapiens
KLVRKNIEKDNAGQVTLVPEEPEDMWHTYNLVQVGDSLRASTIRKVQTESSTGSVGSNRVRTTLTLCVEAIDFDSQACQLRVKGTNIQENEYVKMGAYHTIELEPNRQFTLAKKQWDSVVLERIEQACDPAWSADVAAVVMQEGLAHICLVTPSMTLTRAKVEVNIPRKRKGNCSQHDRALERFYEQVVQAIQRHIHFDVVKCILVASPGFVREQFCDYMFQQAVKTDNKLLLENRSKFLQVHASSGHKYSLKEALCDPTVASRLSDTKAAGEVKALDDFYKMLQHEPDRAFYGLKQVEKANEAMAIDTLLISDELFRHQDVATRSRYVRLVDSVKENAGTVRIFSSLHVSGEQLSQLTGVAAILRFPVPELSDQEGDSSSEED

SEQ ID NO: 371 - protein, 256 aa, Homo sapiens
DPAWSADVAAVVMQEGLAHICLVTPSMTLTRAKVEVNIPRKRKGNCSQHDRALERFYEQVVQAIQRHIHFDVVKCILVASPGFVREQFCDYMFQQAVKTDNKLLLENRSKFLQVHASSGHKYSLKEALCDPTVASRLSDTKAAGEVKALDDFYKMLQHEPDRAFYGLKQVEKANEAMAIDTLLISDELFRHQDVATRSRYVRLVDSVKENAGTVRIFSSLHVSGEQLSQLTGVAAILRFPVPELSDQEGDSSSEED

SEQ ID NO: 372 - protein, 209 aa, Homo sapiens
MDPGKDKEGVPQPSGPPARKKFVIPLDEDEVPPGVRGNPVLKFVRNVPWEFGDVIPDYVLGQSTCALFLSLRYHNLHPDYIHGRLQSLGKNFALRVLLVQVDVKDPQQALKELAKMCILADCTLILAWSPEEAGRYLETYKAYEQKPADLLMEKLEQDFVSRVTECLTTVKSVNKTDSQTLLTTFGSLEQLIAASREDLALCPGLGPQK

SEQ ID NO: 373 - protein, 128 aa, Homo sapiens
KESRAKKFQRQHMDSDSSPSSSSTYCNQMMRRRNMTQGRCKPVNTFVHEPLVDVQNVCFQEKVTCKNGQGNCYKSNSSMHITDCRLTNGSRYPNCAYRTSPKERHIIVACEGSPYVPVHFDASVEDST

SEQ ID NO: 374 - protein, 123 aa, Homo sapiens [sequence omitted]

SEQ ID NO: 375 - protein, 129 aa, Homo sapiens
GLGLVQPSYGQDGMYQRFLRQHVHPEETGGSDRYCNLMMQRRKMTLYHCKRFNTFIHEDIWNIRSICSTTNIQCKNGKMNCHEGVVKVTDCRDTGSSRAPNCRYRAIASTRRVVIACEGNPQVPVHFDG

SEQ ID NO: 376 - protein, 375 aa, Homo sapiens
  misc_feature (1)..(1): Xaa can be any naturally occurring amino acid
XSAVDNILLKLAKFKIGFLRLGQIQKVHPAIQQFTEQEICRSKSIKSLALLEELYNSQLIVATTCMGINHPIFSRKIFDFCIVDEASQISQPICLGPLFFSRRFVLVGDHQQLPPLVLNREARALGMSESLFKRLEQNKSAVVQLTVQYRMNSKIMSLSNKLTYEGKLECGSDKVANAVINLRHFKDVKLELEFYADYSDNPWLMGVFEPNNPVCFLNTDKVPAPEQVEKGGVSNVTEAKLIVFLTSIFVKAGCSPSDIGIIAPYRQQLKIINDLLARSIGMVEVNTVDKYQGRDKSIVLVSFVRSNKDGTVGELLKDWRRLNVAITRAKHKLILLGCVPSLNCYPPLEKLLNHLNSEKLISFFFCIWSHLIALL

SEQ ID NO: 377 - protein, 88 aa, Homo sapiens
MALRSHDRSTRPLYISVGHRMSLEAAVRLTCCCCRFRIPEPVRQADICSREHIRKSLGLPGPPTPRSPKAQRPVACPKGDSGESSALC

SEQ ID NO: 378 - protein, 212 aa, Homo sapiens
CYTNHALSYDQAKRVPRWVLEHISKSKIMGDADRKHCKFKPDPNIPPTFSAFNEDYVGSGWSRGHMAPAGNNKFSSKAMAETFYLSNIVPQDFDNNSGYWNRIEMYCRELTERFEDVWVVSGPLTLPQTRGDGKKIVSYQVIGEDNVAVPSHLYKVILARRSSVSTEPLALGAFVVPNEAIGFQPQLTEFQVSLQDLEKLSGLVFFPHLDRT

SEQ ID NO: 379 - protein, 123 aa, Homo sapiens
VTVSQMTSVLNGKTRRFADIQLQHGALCFNIRYGTTVEEEKNHVLEIARQRAVAQAWTKEQRRLQEGEEGIRAWTEGEKQQLLSTGRVQGYDGYFVLSVEQYLELSDSANNIHFMRQSEIGRR

SEQ ID NO: 380 - protein, 125 aa, Homo sapiens
TVSQPTLLVNGKTRRFTNIEFQYSTLLLSIRYGLTPDTLDEEKARVLDQARQRALGTAWAKEQQKARDGREGSRLWTEGEKQQLLSTGRVQGYEGYYVLPVEQYPELADSSSNIQFLRQNEMGKR

SEQ ID NO: 381 - protein, 137 aa, Artificial Sequence
  RNAseK
MGWLRPGPRPLCPPARASWAFSHRFPSPLAPRRSPTPFFMASLLCCGPKLAACGIVLSAWGVIMLIMLGIFFNVHSAVLIEDVPFTEKDFENGPQNIYNLYEQVSYNCFIAAGLYLLLGGFSFCQVRLNKRKEYMVR

SEQ ID NO: 382 - protein, 1245 aa, Artificial Sequence
  TALEN
MRIGKSSGWLNESVSLEYEHVSPPTRPRDTRRRPRAAGDGGLAHLHRRLAVGYAEDTPRTEARSPAPRRPLPVAPASAPPAPSLVPEPPMPVSLPAVSSPRFSAGSSAAITDPFPSLPPTPVLYAMARELEALSDATWQPAVPLPAEPPTDARRGNTVFDEASASSPVIASACPQAFASPPRAPRSARARRARTGGDAWPAPTFLSRPSSSRIGRDVFGKLVALGYSREQIRKLKQESLSEIAKYHTTLTGQGFTHADICRISRRRQSLRVVARNYPELAAALPELTRAHIVDIARQRSGDLALQALLPVATALTAAPLRLSASQIATVAQYGERPAIQALYRLRRKLTRAPLHLTPQQVVAIASNTGGKRALEAVCVQLPVLRAAPYRLSTEQVVAIASNKGGKQALEAVKAHLLDLLGAPYVLDTEQVVAIASHNGGKQALEAVKADLLDLRGAPYALSTEQVVAIASHNGGKQALEAVKADLLELRGAPYALSTEQVVAIASHNGGKQALEAVKAHLLDLRGVPYALSTEQVVAIASHNGGKQALEAVKAQLLDLRGAPYALSTAQVVAIASNGGGKQALEGIGEQLLKLRTAPYGLSTEQVVAIASHDGGKQALEAVGAQLVALRAAPYALSTEQVVAIASNKGGKQALEAVKAQLLELRGAPYALSTAQVVAIASHDGGNQALEAVGTQLVALRAAPYALSTEQVVAIASHDGGKQALEAVGAQLVALRAAPYALNTEQVVAIASSHGGKQALEAVRALFPDLRAAPYALSTAQLVAIASNPGGKQALEAVRALFRELRAAPYALSTEQVVAIASNHGGKQALEAVRALFRGLRAAPYGLSTAQVVAIASSNGGKQALEAVWALLPVLRATPYDLNTAQIVAIASHDGGKPALEAVWAKLPVLRGAPYALSTAQVVAIACISGQQALEAIEAHMPTLRQASHSLSPERVAAIACIGGRSAVEAVRQGLPVKAIRRIRREKAPVAGPPPASLGPTPQELVAVLHFFRAHQQPRQAFVDALAAFQATRPALLRLLSSVGVTEIEALGGTIPDATERWQRLLGRLGFRPATGAAAPSPDSLQGFAQSLERTLGSPGMAGQSACSPHRKRPAETAIAPRSIRRSPNNAGQPSEPWPDQLAWLQRRKRTARSHIRADSAASVPANLHLGTRAQFTPDRLRAEPGPIMQAHTSPASVSFGSHVAFEPGLPDPGTPTSADLASFEAEPFGVGPLDFHLDWLLQILET

SEQ ID NO: 383 - protein, 1373 aa, Artificial Sequence
  TALEN
MDPIRSRTPSPARELLPGPQPDRVQPTADRGGAPPAGGPLDGLPARRTMSRTRLPSPPAPSPAFSAGSFSDLLRQFDPSLLDTSLLDSMPAVGTPHTAAAPAECDEVQSGLRAADDPPPTVRVAVTAARPPRAKPAPRRRAAQPSDASPAAQVDLRTLGYSQQQQEKIKPKVGSTVAQHHEALVGHGFTHAHIVALSRHPAALGTVAVKYQDMIAALPEATHEDIVGVGKQWSGARALEALLTVAGELRGPPLQLDTGQLVKIAKRGGVTAVEAVHASRNALTGAPLNLTPAQVVAIASNNGGKQALETVQRLLPVLCQAHGLTPAQVVAIASHDGGKQALETMQRLLPVLCQAHGLPPDQVVAIASNIGGKQALETVQRLLPVLCQAHGLTPDQVVAIASHGGGKQALETVQRLLPVLCQAHGLTPDQVVAIASHDGGKQALETVQRLLPVLCQAHGLTPDQVVAIASNGGGKQALETVQRLLPVLCQAHGLTPDQVVAIASNGGKQALETVQRLLPVLCQAHGLTPDQVVAIASHDGGKQALETVQRLLPVLCQTHGLTPAQVVAIASHDGGKQALETVQQLLPVLCQAHGLTPDQVVAIASNIGGKQALATVQRLLPVLCQAHGLTPDQVVAIASNGGGKQALETVQRLLPVLCQAHGLTPDQVVAIASNGGGKQALETVQRLLPVLCQAHGLTQVQVVAIASNIGGKQALETVQRLLPVLCQAHGLTPAQVVAIASHDGGKQALETVQRLLPVLCQAHGLTPDQVVAIASNGGGKQALETVQRLLPVLCQAHGLTQEQVVAIASNNGGKQALETVQRLLPVLCQAHGLTPDQVVAIASNGGGKQALETVQRLLPVLCQAHGLTPAQVVAIASNIGGKQALETVQRLLPVLCQDHGLTLAQVVAIASNIGGKQALETVQRLLPVLCQAHGLTQDQVVAIASNIGGKQALETVQRLLPVLCQDHGLTPDQVVAIASNIGGKQALETVQRLLPVLCQDHGLTLDQVVAIASNGGKQALETVQRLLPVLCQDHGLTPDQVVAIASNSGGKQALETVQRLLPVLCQDHGLTPNQVVAIASNGGKQALESIVAQLSRPDPALAALTNDHLVALACLGGRPAMDAVKKGLPHAPELIRRVNRRIGERTSHRVADYAQVVRVLEFFQCHSHPAYAFDEAMTQFGMSRNGLVQLFRRVGVTELEARGGTLPPASQRWDRILQASGMKRAKPSPTSAQTPDQASLHAFADSLERDLDAPSPMHEGDQTGASSRKRSRSDRAVTGPSAQHSFEVRVPEQRDALHLPLSWRVKRPRTRIGGGLPDPGTPIAADLAASSTVMWEQDAAPFAGAADDFPAFNEEELAWLMELLPQSGSVGGTI

SEQ ID NO: 384 - protein, 1978 aa, Artificial Sequence
  ZNF638
MSRPRFNPRGDFPLQRPRAPNPSGMRPPGPFMRPGSMGLPRFYPAGRARGIPHRFAGHESYQNMGPQRMNVQVTQHRTDPRLTKEKLDFHEAQQKKGKPHGSRWDDEPHISASVAVKQSSVTQVTEQSPKVQSRYTKESASSILASFGLSNEDLEELSRYPDEQLTPENMPLILRDIRMRKMGRRLPNLPSQSRNKETLGSEAVSSNVIDYGHASKYGYTEDPLEVRIYDPEIPTDEVENEFQSQQNISASVPNPNVICNSMFPVEDVFRQMDFPGESSNNRSFFSVESGTKMSGLHISGGQSVLEPIKSVNQSINQTVSQTMSQSLIPPSMNQQPFSSELISSVSQQERIPHEPVINSSNVHVGSRGSKKNYQSQADIPIRSPFGIVKASWLPKFSHADAQKMKRLPTPSMMNDYYAASPRIFPHLCSLCNVECSHLKDWIQHQNTSTHIESCRQLRQQYPDWNPEILPSRRNEGNRKENETPRRRSHSPSPRRSRRSSSSHRFRRSRSPMHYMYRPRSRSPRICHRFISRYRSRSRSRSPYRIRNPFRGSPKCFRSVSPERMSRRSVRSSDRKKALEDVVQRSGHGTEFNKQKHLEAADKGHSPAQKPKTSSGTKPSVKPTSATKSDSNLGGHSIRCKSKNLEDDTLSECKQVSDKAVSLQRKLRKEQSLHYGSVLLITELPEDGCTEEDVRKLFQPFGKVNDVLIVPYRKEAYLEMEFKEAITAIMKYIETTPLTIKGKSVKICVPGKKKAQNKEVKKKTLESKKVSASTLKRDADASKAVEIVTSTSAAKTGQAKASVAKVNKSTGKSASSVKSVVTVAVKGNKASIKTAKSGGKKSLEAKKTGNVKNKDSNKPVTIPENSEIKTSIEVKATENCAKEAISDAALEATENEPLNKETEEMCVMLVSNLPNKGYSVEEVYDLAKPFGGLKDILILSSHKKAYIEINRKAAESMVKFYTCFPVLMDGNQLSISMAPENMNIKDEEAIFITLVKENDPEANIDTIYDRFVHLDNLPEDGLQCVLCVGLQFGKVDHHVFISNRNKAILQLDSPESAQSMYSFLKQNPQNIGDHMLTCSLSPKIDLPEVQIEHDPELEKESPGLKNSPIDESEVQTATDSPSVKPNELEEESTPSIQTETLVQQEEPCEEEAEKATCDSDFAVETLELETQGEEVKEEIPLVASASVSIEQFTENAEECALNQQMFNSDLEKKGAEIINPKTALLPSDSVFAEERNLKGILEESPSEAEDFISGITQTMVEAVAEVEKNETVSEILPSTCIVTLVPGIPTGDEKTVDKKNISEKKGNMDEKEEKEFNTKETRMDLQIGTEKAEKNEGRMDAEKVEKMAAMKEKPAENTLFKAYPNKGVGQANKPDETSKTSILAVSDVSSSKPSIKAVIVSSPKAKATVSKTENQKSFPKSVPRDQINAEKKLSAKEFGLLKPTSARSGLAESSSKFKPTQSSLTRGGSGRISALQGKLSKLDYRDITKQSQETEARPSIMKRDDSNNKTLAEQNTKNPKSTTGRSSKSKEEPLFPFNLDEFVTVDEVIEEVNPSQAKQNPLKGKRKETLKNVPFSELNLKKKKGKTSTPRGVEGELSFVTLDEIGEEEDAAAHLAQALVTVDEVIDEEELNMEEMVKNSNSLFTLDELIDQDDCISHSEPKDVTVLSVAEEQDLLKQERLVTVDEIGEVEELPLNESADITFATLNTKGNEGDTVRDSIGFISSQVPEDPSTLVTVDEIQDDSSDLHLVTLDEVTEEDEDSLADFNNLKEELNFVTVDEVGEEEDGDNDLKVELAQSKNDHPTDKKGNRKKRAVDTKKTKLESLSQVGPVNENVMEEDLKTMIERHLTAKTPTKRVRIGKTLPSEKAVVTEPAKGEEAFQMSEVDEESGLKDSEPERKRKKTEDSSSGKSVASDVPEELDFLVPKAGFFCPICSLFYSGEKAMTNHCKSTRHKQNTEKFMAKQRKEKEQNEAEERSSR

SEQ ID NO: 385 - protein, 1091 aa, Artificial Sequence
  PUMBY
  misc_feature (2)..(2): Xaa can be any naturally occurring amino acid
MDKSKQMNINNLSNIPEVIDPGITIPIYEEEYENNGESNSQLQQQPQKLGSYRSRAGKFSNTLSNLLPSISAKLHHSKKNSHGKNGAEFSSSNNSSQSTVASKTPRASPSRSKMMESSIDGVTMDRPGSLTPPQDMEKLVHFPDSSNNFLIPAPRGSSDSFNLPHQISRTRNNTMSSQITSISSIAPKPRTSSGIWSSNASANDPMQQHLLQQLQPTTSNNTTNSNTLNDYSTKTAYFDNMVSTSGSQMADNKMNTNNLAIPNSVWSNTRQRSQSNASSIYTDAPLYEQPARASISSHYTIPTQESPLIADEIDPQSINWVTMDPTVPSINQISNLLPTNTISISNVFPLQHQQPQLNNAINLTSTSLATLCSKYGEVISARTLRNLNMALVEFSSVESAVKALDSLQGKEVSMIGAPSKISFAKILPMHQQPPQFLLNSQGLPLGLENNNLQPQPLLQEQLFNGAVTFQQQGNVSIPVFNQQSQQSQHQNHSSGSAGFSNVLHGYNNNNSMHGNNNNSANEKEQCPFPLPPPNVNEKEDLLREIIELFEANSDEYQINSLIKKSLNHKGTSDTQNFGPLPEPLSGREFDPPKLRELRKSIDSNAFSDLEIEQLAIAMLDELPELSSDYLGNTIVQKLFEHSSDIIKDIMLRKTSKYLTSMGVHKNGTWACQKMITMAHTPRQIMQVTQGVKDYCTPLINDQFGNYVIQCVLKFGFPWNQFIFESIIANFWVIVQNRYGARAVRACLEAHDIVTPEQSIVLSAMIVTYAEYLSTNSNGALLVTWFLDTSVLPNRHSILAPRLTKRIVELCGHRLASLTILKVLNYRGDDNARKIILDSLFGNVNAHDSSPPKELTKLLCETNYGPTFVHKVLAMPLLEDDLRAHIIKQVRKVLTDSTQIQPSRRLLEEVGLASPSSTHNKTKQQQQQHHNSSISHMFATPDTSGQHMRGLSVSSVKSGGSKHTTMNTTTTNGSSASTLSPGQPLNANSNSSMGYFSYPGVFPVSGFSGNASNGYAMNNDDLSSQFDMLNFNNGTRLSLPQLSLTNHNNTTMELVNNVGSSQPHTNNNNNNNNTNYNDDNTVFETLTLHSAN

SEQ ID NO: 386-392 - skipped (7 entries)

SEQ ID NO: 393 - protein, 350 aa, Artificial Sequence
  PUF26
MGRSRLLEDFRNNRYPNLQLREIAGHIMEFSQDQHGSRFIRLKLERATPAERQLVFNEILQAAYQLMVDVFGNYVIQKFFEFGSLEQKLALAERIRGHVLSLALQMYGSRVIEKALEFIPSDQQNEMVRELDGHVLKCVKDQNGSYVVRKCIECVQPQSLQFIIDAFKGQVFALSTHPYGCRVIQRILEHCLPDQTLPILEELHQHTEQLVQDQYGNYVIQHVLEHGRPEDKSKIVAEIRGNVLVLSQHKFASYVVRKCVTHASRTERAVLIDEVCTMNDGPHSALYTMMKDQYANYVVQKMIDVAEPGQRKIVMHKIRPHIATLRKYTYGKHILAKLEKYYMKNGVDLG

SEQ ID NO: 394 - DNA, 1050 bp, Artificial Sequence
  PUF26
atgggaaggagcagactcctcgaggactttaggaacaatagataccccaacctccagctgagagaaatcgccggccacatcatggagttcagccaagaccagcacggatctagattcattaggctgaagctcgagagagctacacccgccgagaggcaactggtgttcaatgagattctgcaagccgcctaccagctcatggtcgacgtcttcggaaactacgtgatccagaagttcttcgagttcggatctctggagcagaaactcgctctggctgagaggatcagaggccatgtgctgtctctggctctccagatgtacggctctagagtgatcgagaaagccctcgagttcatcccctccgaccaacagaatgagatggtgagggagctggacggccacgtgctgaaatgtgtgaaggaccagaacggctcctacgtcgtgagaaagtgcattgagtgcgtgcagccccagagcctccagtttatcatcgacgccttcaagggccaagtgttcgctctcagcacccatccttacggctgtagagtcatccagagaattctggagcattgcctccccgaccagacactgcctattctcgaggagctccatcagcataccgagcaactcgtccaagaccagtacggcaactacgtgattcagcatgtgctggagcatggcagacccgaggacaagagcaagatcgtggctgagatcagaggcaatgtgctggtgctgagccagcacaaattcgccagctatgtggtgaggaagtgtgtgacacacgcctctagaacagagagggctgtgctcatcgatgaggtgtgcaccatgaacgatggccctcacagcgctctgtacaccatgatgaaggaccagtacgccaactacgtggtgcagaaaatgatcgacgtggctgagcccggccagaggaaaatcgtgatgcacaagatcagacctcatatcgccaccctcagaaagtacacctatggcaaacacattctggccaagctcgagaagtactacatgaaaaatggcgtcgatctgggc

SEQ ID NO: 395 - protein, 350 aa, Artificial Sequence
  PUF54
MGRSRLLEDFRNNRYPNLQLREIAGHIMEFSQDQHGNRFIQLKLERATPAERQLVFNEILQAAYQLMVDVFGSYVIEKFFEFGSLEQKLALAERIRGHVLSLALQMYGSRVIEKALEFIPSDQQNEMVRELDGHVLKCVKDQNGNYVVQKCIECVQPQSLQFIIDAFKGQVFALSTHPYGSRVIERILEHCLPDQTLPILEELHQHTEQLVQDQYGNYVIQHVLEHGRPEDKSKIVAEIRGNVLVLSQHKFASYVVRKCVTHASRTERAVLIDEVCTMNDGPHSALYTMMKDQYASYVVRKMIDVAEPGQRKIVMHKIRPHIATLRKYTYGKHILAKLEKYYMKNGVDLG

SEQ ID NO: 396 - DNA, 1050 bp, Artificial Sequence
  PUF54
atgggaagatccagactgctggaggactttagaaacaataggtaccccaatctgcagctgagagagatcgccggccacatcatggaattcagccaagaccagcacggcaatagattcatccagctgaagctcgagagggctacacccgctgagaggcagctggtcttcaacgagattctgcaagccgcctatcaactgatggtggacgtgttcggcagctatgtgatcgagaagttcttcgaattcggctctctggaacagaagctggctctggccgagaggatcagaggccatgtgctgtctctggctctgcagatgtacggctctagagtcatcgagaaggccctcgagttcatcccctccgaccaacagaacgagatggtgagggagctggacggacacgtgctgaagtgcgtgaaggaccagaacggaaactacgtcgtccagaagtgcatcgaatgcgtgcagccccagagcctccagttcattatcgacgccttcaagggccaagtgttcgccctcagcacacacccttacggaagcagagtgatcgagaggattctggagcactgtctgcccgaccagacactgcctattctggaggagctgcaccaacacacagagcagctggtgcaagaccagtacggcaactatgtcattcagcacgtcctcgagcatggcagacccgaggacaaaagcaagatcgtcgccgaaatcagaggcaatgtgctggtgctcagccaacacaagttcgcttcctacgtcgtgaggaagtgcgtgacacacgcttccagaacagagagagccgtgctcatcgatgaggtgtgcaccatgaacgatggccctcacagcgctctgtataccatgatgaaggaccaatacgccagctatgtggtgagaaagatgatcgacgtggctgaacccggccagagaaagatcgtgatgcacaagatcagaccccacattgccacactgaggaagtatacctacggcaagcacattctggccaagctcgagaagtactacatgaagaacggagtggatctgggc

SEQ ID NO: 397 - protein, 350 aa, Artificial Sequence
  PUF60
MGRSRLLEDFRNNRYPNLQLREIAGHIMEFSQDQHGSRFIQLKLERATPAERQLVFNEILQAAYQLMVDVFGNYVIQKFFEFGSLEQKLALAERIRGHVLSLALQMYGSRVIEKALEFIPSDQQNEMVRELDGHVLKCVKDQNGNYVVQKCIECVQPQSLQFIIDAFKGQVFALSTHPYGSRVIERILEHCLPDQTLPILEELHQHTEQLVQDQYGNYVIQHVLEHGRPEDKSKIVAEIRGNVLVLSQHKFASNVVEKCVTHASRTERAVLIDEVCTMNDGPHSALYTMMKDQYASYVVEKMIDVAEPGQRKIVMHKIRPHIATLRKYTYGKHILAKLEKYYMKNGVDLG

SEQ ID NO: 398 - DNA, 1050 bp, Artificial Sequence
  PUF60
atgggaagatccagactgctggaggactttagaaataatagataccccaatctgcagctgagggaaatcgctggccacatcatggagttctcccaagaccagcatggatctagattcatccagctgaagctcgagagagccacccccgccgaaaggcagctcgtcttcaacgaaattctgcaagccgcctaccaactgatggtggatgtgtttggcaactacgtgatccagaagttcttcgaatttggcagcctcgagcagaagctggctctggccgaaagaattagaggccatgtgctgtctctggccctccagatgtatggctctagagtcatcgaaaaggctctggagttcatcccctccgaccagcagaacgagatggtgagagagctcgacggacatgtgctgaagtgtgtgaaggaccagaacggcaattacgtcgtccagaagtgcatcgagtgcgtgcagccccagtctctgcagtttatcatcgacgccttcaagggccaagtgttcgctctgagcacacacccttacggcagcagagtgatcgagaggattctggaacactgtctgcccgaccagacactgcctattctggaggagctgcaccagcacacagagcagctggtgcaagaccagtacggcaactatgtgatccagcatgtgctggagcatggcagacccgaggacaagagcaagatcgtggccgaaatcagaggcaacgtgctggtgctgagccagcacaagttcgcctccaacgtggtggaaaagtgcgtgacccacgcttctagaacagaaagggctgtgctcatcgatgaggtgtgtaccatgaacgatggccctcacagcgctctgtacaccatgatgaaagaccagtacgccagctacgtggtggagaaaatgatcgacgtcgctgagcccggccagaggaagatcgtgatgcacaagatcagaccccacattgccacactgaggaagtacacctatggcaaacacattctggccaagctcgagaagtactacatgaagaacggagtggatctgggc

SEQ ID NO: 399 - protein, 350 aa, Artificial Sequence
  PUF110
MGRSRLLEDFRNNRYPNLQLREIAGHIMEFSQDQHGSRFIELKLERATPAERQLVFNEILQAAYQLMVDVFGNYVIQKFFEFGSLEQKLALAERIRGHVLSLALQMYGCRVIQKALEFIPSDQQNEMVRELDGHVLKCVKDQNGSYVVRKCIECVQPQSLQFIIDAFKGQVFALSTHPYGNRVIQRILEHCLPDQTLPILEELHQHTEQLVQDQYGCYVIQHVLEHGRPEDKSKIVAEIRGNVLVLSQHKFASYVVRKCVTHASRTERAVLIDEVCTMNDGPHSALYTMMKDQYANYVVQKMIDVAEPGQRKIVMHKIRPHIATLRKYTYGKHILAKLEKYYMKNGVDLG

SEQ ID NO: 400 - DNA, 1050 bp, Artificial Sequence
  PUF110
atgggaagatccagactgctggaggactttagaaacaataggtaccccaacctccagctgagagaaatcgccggccacatcatggagttcagccaagaccagcacggctctagatttattgagctgaagctcgagagagccacccccgccgagaggcaactggtgttcaatgagattctgcaagccgcctaccagctcatggtcgacgtcttcggcaactacgtcatccagaagttcttcgagttcggctctctggaacagaagctggctctggccgagaggatcagaggccacgtgctgtccctcgctctgcagatgtacggctgtagggtgatccagaaggctctggagttcatcccttccgaccagcagaacgagatggtgagagagctggatggacacgtgctgaaatgcgtcaaggaccagaacggctcctatgtggtgagaaagtgcatcgagtgcgtgcagccccagtctctgcagttcatcatcgacgccttcaagggccaagtcttcgccctcagcacacacccttacggaaatagagtcatccagaggattctggaacactgtctgcccgaccagacactgcctattctggaggagctgcaccaacacacagagcagctggtccaagaccagtatggctgctacgtgatccagcacgtgctggagcatggaagacccgaggataagagcaagatcgtcgccgaaatcagaggcaatgtgctggtgctcagccaacacaagttcgcttcctacgtcgtgaggaaatgcgtgacacacgcttctagaacagaaagggccgtgctcatcgatgaggtgtgcaccatgaacgatggcccccacagcgctctgtataccatgatgaaggaccagtacgccaactacgtggtgcagaagatgatcgacgtggctgagcccggccagaggaagattgtgatgcacaagattaggccccatatcgccacactgagaaagtacacctacggaaagcatatcctcgccaagctcgagaagtactacatgaagaacggcgtcgacctcggc

SEQ ID NO: 401 - protein, 561 aa, Artificial Sequence
  PUM14
MGRSRLLEDFRNNRYPNLQLREIAHTEQLVQDQYGNYVIQHVLEHGRPEDKSKIVAEIRGHTEQLVQDQYGCYVIQHVLEHGRPEDKSKIVAEIRGHTEQLVQDQYGSYVIRHVLEHGRPEDKSKIVAEIRGHTEQLVQDQYGCYVIQHVLEHGRPEDKSKIVAEIRGHTEQLVQDQYGNYVIQHVLEHGRPEDKSKIVAEIRGHTEQLVQDQYGSYVIRHVLEHGRPEDKSKIVAEIRGHTEQLVQDQYGNYVIQHVLEHGRPEDKSKIVAEIRGHTEQLVQDQYGNYVIQHVLEHGRPEDKSKIVAEIRGHTEQLVQDQYGCYVIQHVLEHGRPEDKSKIVAEIRGHTEQLVQDQYGSYVIRHVLEHGRPEDKSKIVAEIRGHTEQLVQDQYGSYVIEHVLEHGRPEDKSKIVAEIRGHTEQLVQDQYGSYVIEHVLEHGRPEDKSKIVAEIRGHTEQLVQDQYGNYVIQHVLEHGRPEDKSKIVAEIRGHTEQLVQDQYGSYVIEHVLEHGRPEDKSKIVAEIRGPHIATLRKYTYGKHILAKLEKYYMKNGVDLGGR

SEQ ID NO: 402 - DNA, 1683 bp, Artificial Sequence
  PUM14
atgggcagaagccggctgctggaagatttccggaacaacagataccccaacctgcagctgagagagatcgcccacacagagcagctggtgcaggaccagtacggcaactacgtgatccagcatgtgctggaacacggcagacccgaggacaagtctaagatcgtggccgagatcagaggccacaccgaacagctcgtccaggatcaatacggctgttatgtgattcagcacgtcctcgagcacggacggcctgaggataagagcaaaattgtggccgaaatccggggccatactgaacaactggttcaggatcagtatgggtcctatgtgatccgccacgtcctggaacatggacgcccagaggacaaaagcaagatcgtcgctgagattcggggacataccgagcaactcgtccaagaccagtacggctgttacgtgatccagcatgtgctggaacacggcagacccgaggacaagtctaagatcgtggccgagatcagaggccacaccgaacagctggtgcaggaccagtacggcaactatgtgattcagcacgtcctcgagcacggacggcctgaggataagagcaaaattgtggccgaaatccggggacacacagagcagctcgtccaggatcagtatggctcctacgtgatcagacacgttttggagcacggcaggccagaagataagtccaagattgtcgctgagattcgcgggcatactgagcaactggtgcaagatcaatacgggaattacgtcatccaacacgttctcgaacatggaaggccagaggacaaaagcaagatcgtcgcagaaattaggggccatacagaacaactggtccaggaccagtacggcaactacgtgatccagcatgtgctggaacacggcagacccgaggacaagtctaagatcgtggccgagatcagaggccacaccgaacagctggtgcaggatcagtacggctgttatgtgattcagcacgtcctcgagcacggacggcctgaggataagagcaaaattgtggccgaaatccggggacacacagagcagctggtccaagaccagtatggaagctatgtcatcaggcacgtcctggaacatggacgcccagaggacaaaagcaagatcgtcgctgagattcggggccatactgagcagctcgttcaggaccaatacgggtcttacgtgatcgaacacgtgttggagcatggcaggcccgaagataagtccaaaattgtcgcagagatacgcggccacaccgaacagctggtgcaggatcagtacggcagctacgtgatcgagcatgtgctggaacacggcagacccgaggacaagtctaagatcgtggccgagatcagaggccacaccgagcagctcgttcaggaccagtatggcaattatgtgatccagcacgtcctcgagcacggacggcctgaggataagagcaaaattgtggccgaaatccggggacacacagagcaactggtccaagaccagtacggctcctatgtgattgaacacgttctggaacatggacgcccagaggacaaaagcaagatcgtcgctgagattcggggccctcacattgccacactgcggaagtacacctacggcaagcacatcctggccaagctggaaaagtactacatgaagaacggcgtggacctcggcggcaga

SEQ ID NO: 403 - RNA, 93 nt, Artificial Sequence
  Scaffold Sequence
guuuaagagcuaugcuggaaacagcauagcaaguuuaaauaaggcuaguccguuaucaacuugaaaaaguggcaccgagucggugcuuuuuuu

SEQ ID NO: 404 - RNA, 73 nt, Artificial Sequence
  Scaffold Sequence
ggacagcauagcaaguuaaaauaaggcuaguccguuaucaacuugaaaaaguggcaccgagucggugcuuuuu

SEQ ID NO: 405 - RNA, 83 nt, Artificial Sequence
  Scaffold Sequence
guuuuagagcuagaaauagcaaguuaaaauaaggcuaguccguuaucaacuugaaaaaguggcaccgagucggugcuuuuuuu

SEQ ID NO: 406 - DNA, 24 bp, Homo sapiens
gccagcgtggcattctacatcttc

SEQ ID NO: 407 - protein, 8 aa, Homo sapiens
ASVAFYIF

SEQ ID NO: 408 - DNA, 24 bp, Homo sapiens
gcttccgtagctttttatattttt

SEQ ID NO: 409 - DNA, 26 bp, Homo sapiens
tgaagatgtagaatgccacgctggcg

SEQ ID NO: 410 - DNA, 20 bp, Artificial Sequence
  Firefly Luciferase  Forward primer
gtggtgtgcagcgagaatag

SEQ ID NO: 411 - DNA, 22 bp, Artificial Sequence
  Firefly Luciferase  Reverse primer
cgctcgttgtagatgtcgttag

SEQ ID NO: 412 - DNA, 20 bp, Artificial Sequence
  Renilla Luciferase - Forward primer
ttctggattcatcgactgtg

SEQ ID NO: 413 - DNA, 20 bp, Artificial Sequence
  Renilla Luciferase - Reverse primer
ttcagcaatatcacgggtag

SEQ ID NO: 414 - DNA, 19 bp, Artificial Sequence
  Hardened RHO - Forward primer
actgcatgctcaccaccat

SEQ ID NO: 415 - DNA, 20 bp, Artificial Sequence
  Hardened RHO - Reverse primer
cgaagaactccagcatgaga

SEQ ID NO: 416 - protein, 1368 aa, Streptococcus pyogenes [sequence omitted]

SEQ ID NO: 417 - protein, 1368 aa, Streptococcus pyogenes
MDKKYSIGLAIGTNSVGWAVITDEYKVPSKKFKVLGNTDRHSIKKNLIGALLFDSGETAEATRLKRTARRRYTRRKNRICYLQEIFSNEMAKVDDSFFHRLEESFLVEEDKKHERHPIFGNIVDEVAYHEKYPTIYHLRKKLVDSTDKADLRLIYLALAHMIKFRGHFLIEGDLNPDNSDVDKLFIQLVQTYNQLFEENPINASGVDAKAILSARLSKSRRLENLIAQLPGEKKNGLFGNLIALSLGLTPNFKSNFDLAEDAKLQLSKDTYDDDLDNLLAQIGDQYADLFLAAKNLSDAILLSDILRVNTEITKAPLSASMIKRYDEHHQDLTLLKALVRQQLPEKYKEIFFDQSKNGYAGYIDGGASQEEFYKFIKPILEKMDGTEELLVKLNREDLLRKQRTFDNGSIPHQIHLGELHAILRRQEDFYPFLKDNREKIEKILTFRIPYYVGPLARGNSRFAWMTRKSEETITPWNFEEVVDKGASAQSFIERMTNFDKNLPNEKVLPKHSLLYEYFTVYNELTKVKYVTEGMRKPAFLSGEQKKAIVDLLFKTNRKVTVKQLKEDYFKKIECFDSVEISGVEDRFNASLGTYHDLLKIIKDKDFLDNEENEDILEDIVLTLTLFEDREMIEERLKTYAHLFDDKVMKQLKRRRYTGWGRLSRKLINGIRDKQSGKTILDFLKSDGFANRNFMQLIHDDSLTFKEDIQKAQVSGQGDSLHEHIANLAGSPAIKKGILQTVKVVDELVKVMGRHKPENIVIEMARENQTTQKGQKNSRERMKRIEEGIKELGSQILKEHPVENTQLQNEKLYLYYLQNGRDMYVDQELDINRLSDYDVDAIVPQSFLKDDSIDNKVLTRSDKNRGKSDNVPSEEVVKKMKNYWRQLLNAKLITQRKFDNLTKAERGGLSELDKAGFIKRQLVETRQITKHVAQILDSRMNTKYDENDKLIREVKVITLKSKLVSDFRKDFQFYKVREINNYHHAHDAYLNAVVGTALIKKYPKLESEFVYGDYKVYDVRKMIAKSEQEIGKATAKYFFYSNIMNFFKTEITLANGEIRKRPLIETNGETGEIVWDKGRDFATVRKVLSMPQVNIVKKTEVQTGGFSKESILPKRNSDKLIARKKDWDPKKYGGFDSPTVAYSVLVVAKVEKGKSKKLKSVKELLGITIMERSSFEKNPIDFLEAKGYKEVKKDLIIKLPKYSLFELENGRKRMLASAGELQKGNELALPSKYVNFLYLASHYEKLKGSPEDNEQKQLFVEQHKHYLDEIIEQISEFSKRVILADANLDKVLSAYNKHRDKPIREQAENIIHLFTLTNLGAPAAFKYFDTTIDRKRYTSTKEVLDATLIHQSITGLYETRIDLSQLGGD

SEQ ID NO: 418 - protein, 1368 aa, Streptococcus pyogenes [sequence omitted]

SEQ ID NO: 419 - protein, 1053 aa, Staphylococcus aureus
MKRNYILGLDIGITSVGYGIIDYETRDVIDAGVRLFKEANVENNEGRRSKRGARRLKRRRRHRIQRVKKLLFDYNLLTDHSELSGINPYEARVKGLSQKLSEEEFSAALLHLAKRRGVHNVNEVEEDTGNELSTKEQISRNSKALEEKYVAELQLERLKKDGEVRGSINRFKTSDYVKEAKQLLKVQKAYHQLDQSFIDTYIDLLETRRTYYEGPGEGSPFGWKDIKEWYEMLMGHCTYFPEELRSVKYAYNADLYNALNDLNNLVITRDENEKLEYYEKFQIIENVFKQKKKPTLKQIAKEILVNEEDIKGYRVTSTGKPEFTNLKVYHDIKDITARKEIIENAELLDQIAKILTIYQSSEDIQEELTNLNSELTQEEIEQISNLKGYTGTHNLSLKAINLILDELWHTNDNQIAIFNRLKLVPKKVDLSQQKEIPTTLVDDFILSPVVKRSFIQSIKVINAIIKKYGLPNDIIIELAREKNSKDAQKMINEMQKRNRQTNERIEEIIRTTGKENAKYLIEKIKLHDMQEGKCLYSLEAIPLEDLLNNPFNYEVDHIIPRSVSFDNSFNNKVLVKQEENSKKGNRTPFQYLSSSDSKISYETFKKHILNLAKGKGRISKTKKEYLLEERDINRFSVQKDFINRNLVDTRYATRGLMNLLRSYFRVNNLDVKVKSINGGFTSFLRRKWKFKKERNKGYKHHAEDALIIANADFIFKEWKKLDKAKKVMENQMFEEKQAESMPEIETEQEYKEIFITPHQIKHIKDFKDYKYSHRVDKKPNRELINDTLYSTRKDDKGNTLIVNNLNGLYDKDNDKLKKLINKSPEKLLMYHHDPQTYQKLKLIMEQYGDEKNPLYKYYEETGNYLTKYSKKDNGPVIKKIKYYGNKLNAHLDITDDYPNSRNKVVKLSLKPYRFDVYLDNGVYKFVTVKNLDVIKKENYYEVNSKCYEEAKKLKKISNQAEFIASFYNNDLIKINGELYRVIGVNNDLLNRIEVNMIDITYREYLENMNDKRPPRIIKTIASKTQSIKKYSTDILGNLYEVKSKKHPQIIKKG

SEQ ID NO: 420 - protein, 1121 aa, Streptococcus thermophilus
MSDLVLGLDIGIGSVGVGILNKVTGEIIHKNSRIFPAAQAENNLVRRTNRQGRRLARRKKHRRVRLNRLFEESGLITDFTKISINLNPYQLRVKGLTDELSNEELFIALKNMVKHRGISYLDDASDDGNSSVGDYAQIVKENSKQLETKTPGQIQLERYQTYGQLRGDFTVEKDGKKHRLINVFPTSAYRSEALRILQTQQEFNPQITDEFINRYLEILTGKRKYYHGPGNEKSRTDYGRYRTSGETLDNIFGILIGKCTFYPDEFRAAKASYTAQEFNLLNDLNNLTVPTETKKLSKEQKNQIINYVKNEKAMGPAKLFKYIAKLLSCDVADIKGYRIDKSGKAEIHTFEAYRKMKTLETLDIEQMDRETLDKLAYVLTLNTEREGIQEALEHEFADGSFSQKQVDELVQFRKANSSIFGKGWHNFSVKLMMELIPELYETSEEQMTILTRLGKQKTTSSSNKTKYIDEKLLTEEIYNPVVAKSVRQAIKIVNAAIKEYGDFDNIVIEMARETNEDDEKKAIQKIQKANKDEKDAAMLKAANQYNGKAELPHSVFHGHKQLATKIRLWHQQGERCLYTGKTISIHDLINNSNQFEVDHILPLSITFDDSLANKVLVYATANQEKGQRTPYQALDSMDDAWSFRELKAFVRESKTLSNKKKEYLLTEEDISKFDVRKKFIERNLVDTRYASRVVLNALQEHFRAHKIDTKVSVVRGQFTSQLRRHWGIEKTRDTYHHHAVDALIIAASSQLNLWKKQKNTLVSYSEDQLLDIETGELISDDEYKESVFKAPYQHFVDTLKSKEFEDSILFSYQVDSKFNRKISDATIYATRQAKVGKDKADETYVLGKIKDIYTQDGYDAFMKIYKKDKSKFLMYRHDPQTFEKVIEPILENYPNKQINDKGKEVPCNPFLKYKEEHGYIRKYSKKGNGPEIKSLKYYDSKLGNHIDITPKDSNNKVVLQSVSPWRADVYFNKTTGKYEILGLKYADLQFDKGTGTYKISQEKYNDIKKKEGVDSDSEFKFTLYKNDLLLVKDTETKEQQLFRFLSRTMPKQKHYVELKPYDKQKFEGGEALIKVLGNVANSGQCKKGLGKSNISIYKVRTDVLGNQHIIKNEGDKPKLDF

SEQ ID NO: 421 - protein, 1082 aa, Neisseria meningitidis
MAAFKPNPINYILGLDIGIASVGWAMVEIDEDENPICLIDLGVRVFERAEVPKTGDSLAMARRLARSVRRLTRRRAHRLLRARRLLKREGVLQAADFDENGLIKSLPNTPWQLRAAALDRKLTPLEWSAVLLHLIKHRGYLSQRKNEGETADKELGALLKGVADNAHALQTGDFRTPAELALNKFEKESGHIRNQRGDYSHTFSRKDLQAELILLFEKQKEFGNPHVSGGLKEGIETLLMTQRPALSGDAVQKMLGHCTFEPAEPKAAKNTYTAERFIWLTKLNNLRILEQGSERPLTDTERATLMDEPYRKSKLTYAQARKLLGLEDTAFFKGLRYGKDNAEASTLMEMKAYHAISRALEKEGLKDKKSPLNLSPELQDEIGTAFSLFKTDEDITGRLKDRIQPEILEALLKHISFDKFVQISLKALRRIVPLMEQGKRYDEACAEIYGDHYGKKNTEEKIYLPPIPADEIRNPVVLRALSQARKVINGVVRRYGSPARIHIETAREVGKSFKDRKEIEKRQEENRKDREKAAAKFREYFPNFVGEPKSKDILKLRLYEQQHGKCLYSGKEINLGRLNEKGYVEIDHALPFSRTWDDSFNNKVLVLGSENQNKGNQTPYEYFNGKDNSREWQEFKARVETSRFPRSKKQRILLQKFDEDGFKERNLNDTRYVNRFLCQFVADRMRLTGKGKKRVFASNGQITNLLRGFWGLRKVRAENDRHHALDAVVVACSTVAMQQKITRFVRYKEMNAFDGKTIDKETGEVLHQKTHFPQPWEFFAQEVMIRVFGKPDGKPEFEEADTPEKLRTLLAEKLSSRPEAVHEYVTPLFVSRAPNRKMSGQGHMETVKSAKRLDEGVSVLRVPLTQLKLKDLEKMVNREREPKLYEALKARLEAHKDDPAKAFAEPFYKYDKAGNRTQQVKAVRVEQVQKTGVWVRNHNGIADNATMVRVDVFEKGDKYYLVPIYSWQVAKGILPDRAVVQGKDEEDWQLIDDSFNFKFSLHPNDLVEVITKKARMFGYFASCHRGTGNINIRIHDLDHKIGKNGILEGIGVKTALSFQKYQIDELGKEIRPCRLKKRPPVR

SEQ ID NO: 422 - protein, 1037 aa, Parvibaculum lavamentivorans
MERIFGFDIGTTSIGFSVIDYSSTQSAGNIQRLGVRIFPEARDPDGTPLNQQRRQKRMMRRQLRRRRIRRKALNETLHEAGFLPAYGSADWPVVMADEPYELRRRGLEEGLSAYEFGRAIYHLAQHRHFKGRELEESDTPDPDVDDEKEAANERAATLKALKNEQTTLGAWLARRPPSDRKRGIHAHRNVVAEEFERLWEVQSKFHPALKSEEMRARISDTIFAQRPVFWRKNTLGECRFMPGEPLCPKGSWLSQQRRMLEKLNNLAIAGGNARPLDAEERDAILSKLQQQASMSWPGVRSALKALYKQRGEPGAEKSLKFNLELGGESKLLGNALEAKLADMFGPDWPAHPRKQEIRHAVHERLWAADYGETPDKKRVIILSEKDRKAHREAAANSFVADFGITGEQAAQLQALKLPTGWEPYSIPALNLFLAELEKGERFGALVNGPDWEGWRRTNFPHRNQPTGEILDKLPSPASKEERERISQLRNPTVVRTQNELRKVVNNLIGLYGKPDRIRIEVGRDVGKSKREREEIQSGIRRNEKQRKKATEDLIKNGIANPSRDDVEKWILWKEGQERCPYTGDQIGFNALFREGRYEVEHIWPRSRSFDNSPRNKTLCRKDVNIEKGNRMPFEAFGHDEDRWSAIQIRLQGMVSAKGGTGMSPGKVKRFLAKTMPEDFAARQLNDTRYAAKQILAQLKRLWPDMGPEAPVKVEAVTGQVTAQLRKLWTLNNILADDGEKTRADHRHHAIDALTVACTHPGMTNKLSRYWQLRDDPRAEKPALTPPWDTIRADAEKAVSEIVVSHRVRKKVSGPLHKETTYGDTGTDIKTKSGTYRQFVTRKKIESLSKGELDEIRDPRIKEIVAAHVAGRGGDPKKAFPPYPCVSPGGPEIRKVRLTSKQQLNLMAQTGNGYADLGSNHHIAIYRLPDGKADFEIVSLFDASRRLAQRNPIVQRTRADGASFVMSLAAGEAIMIPEGSKKGIWIVQGVWASGQVVLERDTDADHSTTTRPMPNPILKDDAKKVSIDPIGRVRPSND

SEQ ID NO: 423 - protein, 1084 aa, Corynebacter diphtheria
MKYHVGIDVGTFSVGLAAIEVDDAGMPIKTLSLVSHIHDSGLDPDEIKSAVTRLASSGIARRTRRLYRRKRRRLQQLDKFIQRQGWPVIELEDYSDPLYPWKVRAELAASYIADEKERGEKLSVALRHIARHRGWRNPYAKVSSLYLPDGPSDAFKAIREEIKRASGQPVPETATVGQMVTLCELGTLKLRGEGGVLSARLQQSDYAREIQEICRMQEIGQELYRKIIDVVFAAESPKGSASSRVGKDPLQPGKNRALKASDAFQRYRIAALIGNLRVRVDGEKRILSVEEKNLVFDHLVNLTPKKEPEWVTIAEILGIDRGQLIGTATMTDDGERAGARPPTHDTNRSIVNSRIAPLVDWWKTASALEQHAMVKALSNAEVDDFDSPEGAKVQAFFADLDDDVHAKLDSLHLPVGRAAYSEDTLVRLTRRMLSDGVDLYTARLQEFGIEPSWTPPTPRIGEPVGNPAVDRVLKTVSRWLESATKTWGAPERVIIEHVREGFVTEKRAREMDGDMRRRAARNAKLFQEMQEKLNVQGKPSRADLWRYQSVQRQNCQCAYCGSPITFSNSEMDHIVPRAGQGSTNTRENLVAVCHRCNQSKGNTPFAIWAKNTSIEGVSVKEAVERTRHWVTDTGMRSTDFKKFTKAVVERFQRATMDEEIDARSMESVAWMANELRSRVAQHFASHGTTVRVYRGSLTAEARRASGISGKLKFFDGVGKSRLDRRHHAIDAAVIAFTSDYVAETLAVRSNLKQSQAHRQEAPQWREFTGKDAEHRAAWRVWCQKMEKLSALLTEDLRDDRVVVMSNVRLRLGNGSAHKETIGKLSKVKLSSQLSVSDIDKASSEALWCALTREPGFDPKEGLPANPERHIRVNGTHVYAGDNIGLFPVSAGSIALRGGYAELGSSFHHARVYKITSGKKPAFAMLRVYTIDLLPYRNQDLFSVELKPQTMSMRQAEKKLRDALATGNAEYLGWLVVDDELVVDTSKIATDQVKAVEAELGTIRRWRVDGFFSPSKLRLRPLQMSKEGIKKESAPELSKIIDRPGWLPAVNKLFSDGNVTVVRRDSLGRVRLESTAHLPVTWKVQ

SEQ ID NO: 424 - protein, 1130 aa, Streptococcus pasteurianus
MTNGKILGLDIGIASVGVGIIEAKTGKVVHANSRLFSAANAENNAERRGFRGSRRLNRRKKHRVKRVRDLFEKYGIVTDFRNLNLNPYELRVKGLTEQLKNEELFAALRTISKRRGISYLDDAEDDSTGSTDYAKSIDENRRLLKNKTPGQIQLERLEKYGQLRGNFTVYDENGEAHRLINVFSTSDYEKEARKILETQADYNKKITAEFIDDYVEILTQKRKYYHGPGNEKSRTDYGRFRTDGTTLENIFGILIGKCNFYPDEYRASKASYTAQEYNFLNDLNNLKVSTETGKLSTEQKESLVEFAKNTATLGPAKLLKEIAKILDCKVDEIKGYREDDKGKPDLHTFEPYRKLKFNLESINIDDLSREVIDKLADILTLNTEREGIEDAIKRNLPNQFTEEQISEIIKVRKSQSTAFNKGWHSFSAKLMNELIPELYATSDEQMTILTRLEKFKVNKKSSKNTKTIDEKEVTDEIYNPVVAKSVRQTIKIINAAVKKYGDFDKIVIEMPRDKNADDEKKFIDKRNKENKKEKDDALKRAAYLYNSSDKLPDEVFHGNKQLETKIRLWYQQGERCLYSGKPISIQELVHNSNNFEIDHILPLSLSFDDSLANKVLVYAWTNQEKGQKTPYQVIDSMDAAWSFREMKDYVLKQKGLGKKKRDYLLTTENIDKIEVKKKFIERNLVDTRYASRVVLNSLQSALRELGKDTKVSVVRGQFTSQLRRKWKIDKSRETYHHHAVDALIIAASSQLKLWEKQDNPMFVDYGKNQVVDKQTGEILSVSDDEYKELVFQPPYQGFVNTISSKGFEDEILFSYQVDSKYNRKVSDATIYSTRKAKIGKDKKEETYVLGKIKDIYSQNGFDTFIKKYNKDKTQFLMYQKDSLTWENVIEVILRDYPTTKKSEDGKNDVKCNPFEEYRRENGLICKYSKKGKGTPIKSLKYYDKKLGNCIDITPEESRNKVILQSINPWRADVYFNPETLKYELMGLKYSDLSFEKGTGNYHISQEKYDAIKEKEGIGKKSEFKFTLYRNDLILIKDIASGEQEIYRFLSRTMPNVNHYVELKPYDKEKFDNVQELVEALGEADKVGRCIKGLNKPNISIYKVRTDVLGNKYFVKKKGDKPKLDFKNNKK

SEQ ID NO: 425 - protein, 1082 aa, Neisseria cinerea
MAAFKPNPMNYILGLDIGIASVGWAIVEIDEEENPIRLIDLGVRVFERAEVPKTGDSLAAARRLARSVRRLTRRRAHRLLRARRLLKREGVLQAADFDENGLIKSLPNTPWQLRAAALDRKLTPLEWSAVLLHLIKHRGYLSQRKNEGETADKELGALLKGVADNTHALQTGDFRTPAELALNKFEKESGHIRNQRGDYSHTFNRKDLQAELNLLFEKQKEFGNPHVSDGLKEGIETLLMTQRPALSGDAVQKMLGHCTFEPTEPKAAKNTYTAERFVWLTKLNNLRILEQGSERPLTDTERATLMDEPYRKSKLTYAQARKLLDLDDTAFFKGLRYGKDNAEASTLMEMKAYHAISRALEKEGLKDKKSPLNLSPELQDEIGTAFSLFKTDEDITGRLKDRVQPEILEALLKHISFDKFVQISLKALRRIVPLMEQGNRYDEACTEIYGDHYGKKNTEEKIYLPPIPADEIRNPVVLRALSQARKVINGVVRRYGSPARIHIETAREVGKSFKDRKEIEKRQEENRKDREKSAAKFREYFPNFVGEPKSKDILKLRLYEQQHGKCLYSGKEINLGRLNEKGYVEIDHALPFSRTWDDSFNNKVLALGSENQNKGNQTPYEYFNGKDNSREWQEFKARVETSRFPRSKKQRILLQKFDEDGFKERNLNDTRYINRFLCQFVADHMLLTGKGKRRVFASNGQITNLLRGFWGLRKVRAENDRHHALDAVVVACSTIAMQQKITRFVRYKEMNAFDGKTIDKETGEVLHQKAHFPQPWEFFAQEVMIRVFGKPDGKPEFEEADTPEKLRTLLAEKLSSRPEAVHKYVTPLFISRAPNRKMSGQGHMETVKSAKRLDEGISVLRVPLTQLKLKDLEKMVNREREPKLYEALKARLEAHKDDPAKAFAEPFYKYDKAGNRTQQVKAVRVEQVQKTGVWVHNHNGIADNATIVRVDVFEKGGKYYLVPIYSWQVAKGILPDRAVVQGKDEEDWTVMDDSFEFKFVLYANDLIKLTAKKNEFLGYFVSLNRATGAIDIRTHDTDSTKGKNGIFQSVGVKTALSFQKYQIDELGKEIRPCRLKKRPPVR

SEQ ID NO: 426 - protein, 1003 aa, Campylobacter lari
MRILGFDIGINSIGWAFVENDELKDCGVRIFTKAENPKNKESLALPRRNARSSRRRLKRRKARLIAIKRILAKELKLNYKDYVAADGELPKAYEGSLASVYELRYKALTQNLETKDLARVILHIAKHRGYMNKNEKKSNDAKKGKILSALKNNALKLENYQSVGEYFYKEFFQKYKKNTKNFIKIRNTKDNYNNCVLSSDLEKELKLILEKQKEFGYNYSEDFINEILKVAFFQRPLKDFSHLVGACTFFEEEKRACKNSYSAWEFVALTKIINEIKSLEKISGEIVPTQTINEVLNLILDKGSITYKKFRSCINLHESISFKSLKYDKENAENAKLIDFRKLVEFKKALGVHSLSRQELDQISTHITLIKDNVKLKTVLEKYNLSNEQINNLLEIEFNDYINLSFKALGMILPLMREGKRYDEACEIANLKPKTVDEKKDFLPAFCDSIFAHELSNPVVNRAISEYRKVLNALLKKYGKVHKIHLELARDVGLSKKAREKIEKEQKENQAVNAWALKECENIGLKASAKNILKLKLWKEQKEICIYSGNKISIEHLKDEKALEVDHIYPYSRSFDDSFINKVLVFTKENQEKLNKTPFEAFGKNIEKWSKIQTLAQNLPYKKKNKILDENFKDKQQEDFISRNLNDTRYIATLIAKYTKEYLNFLLLSENENANLKSGEKGSKIHVQTISGMLTSVLRHTWGFDKKDRNNHLHHALDAIIVAYSTNSIIKAFSDFRKNQELLKARFYAKELTSDNYKHQVKFFEPFKSFREKILSKIDEIFVSKPPRKRARRALHKDTFHSENKIIDKCSYNSKEGLQIALSCGRVRKIGTKYVENDTIVRVDIFKKQNKFYAIPIYAMDFALGILPNKIVITGKDKNNNPKQWQTIDESYEFCFSLYKNDLILLQKKNMQEPEFAYYNDFSISTSSICVEKHDNKFENLTSNQKLLFSNAKEGSVKVESLGIQNLKVFEKYIITPLGDKIKADFQPRENISLKTSKKYGLR

SEQ ID NO: 427 - protein, 1395 aa, Treponema denticola
MKKEIKDYFLGLDVGTGSVGWAVTDTDYKLLKANRKDLWGMRCFETAETAEVRRLHRGARRRIERRKKRIKLLQELFSQEIAKTDEGFFQRMKESPFYAEDKTILQENTLFNDKDFADKTYHKAYPTINHLIKAWIENKVKPDPRLLYLACHNIIKKRGHFLFEGDFDSENQFDTSIQALFEYLREDMEVDIDADSQKVKEILKDSSLKNSEKQSRLNKILGLKPSDKQKKAITNLISGNKINFADLYDNPDLKDAEKNSISFSKDDFDALSDDLASILGDSFELLLKAKAVYNCSVLSKVIGDEQYLSFAKVKIYEKHKTDLTKLKNVIKKHFPKDYKKVFGYNKNEKNNNNYSGYVGVCKTKSKKLIINNSVNQEDFYKFLKTILSAKSEIKEVNDILTEIETGTFLPKQISKSNAEIPYQLRKMELEKILSNAEKHFSFLKQKDEKGLSHSEKIIMLLTFKIPYYIGPINDNHKKFFPDRCWVVKKEKSPSGKTTPWNFFDHIDKEKTAEAFITSRTNFCTYLVGESVLPKSSLLYSEYTVLNEINNLQIIIDGKNICDIKLKQKIYEDLFKKYKKITQKQISTFIKHEGICNKTDEVIILGIDKECTSSLKSYIELKNIFGKQVDEISTKNMLEEIIRWATIYDEGEGKTILKTKIKAEYGKYCSDEQIKKILNLKFSGWGRLSRKFLETVTSEMPGFSEPVNIITAMRETQNNLMELLSSEFTFTENIKKINSGFEDAEKQFSYDGLVKPLFLSPSVKKMLWQTLKLVKEISHITQAPPKKIFIEMAKGAELEPARTKTRLKILQDLYNNCKNDADAFSSEIKDLSGKIENEDNLRLRSDKLYLYYTQLGKCMYCGKPIEIGHVFDTSNYDIDHIYPQSKIKDDSISNRVLVCSSCNKNKEDKYPLKSEIQSKQRGFWNFLQRNNFISLEKLNRLTRATPISDDETAKFIARQLVETRQATKVAAKVLEKMFPETKIVYSKAETVSMFRNKFDIVKCREINDFHHAHDAYLNIVVGNVYNTKFTNNPWNFIKEKRDNPKIADTYNYYKVFDYDVKRNNITAWEKGKTIITVKDMLKRNTPIYTRQAACKKGELFNQTIMKKGLGQHPLKKEGPFSNISKYGGYNKVSAAYYTLIEYEEKGNKIRSLETIPLYLVKDIQKDQDVLKSYLTDLLGKKEFKILVPKIKINSLLKINGFPCHITGKTNDSFLLRPAVQFCCSNNEVLYFKKIIRFSEIRSQREKIGKTISPYEDLSFRSYIKENLWKKTKNDEIGEKEFYDLLQKKNLEIYDMLLTKHKDTIYKKRPNSATIDILVKGKEKFKSLIIENQFEVILEILKLFSATRNVSDLQHIGGSKYSGVAKIGNKISSLDNCILIYQSITGIFEKRIDLLKV

SEQ ID NO: 428 - protein, 1345 aa, Streptococcus mutans
MKKPYSIGLDIGTNSVGWAVVTDDYKVPAKKMKVLGNTDKSHIEKNLLGALLFDSGNTAEDRRLKRTARRRYTRRRNRILYLQEIFSEEMGKVDDSFFHRLEDSFLVTEDKRGERHPIFGNLEEEVKYHENFPTIYHLRQYLADNPEKVDLRLVYLALAHIIKFRGHFLIEGKFDTRNNDVQRLFQEFLAVYDNTFENSSLQEQNVQVEEILTDKISKSAKKDRVLKLFPNEKSNGRFAEFLKLIVGNQADFKKHFELEEKAPLQFSKDTYEEELEVLLAQIGDNYAELFLSAKKLYDSILLSGILTVTDVGTKAPLSASMIQRYNEHQMDLAQLKQFIRQKLSDKYNEVFSDVSKDGYAGYIDGKTNQEAFYKYLKGLLNKIEGSGYFLDKIEREDFLRKQRTFDNGSIPHQIHLQEMRAIIRRQAEFYPFLADNQDRIEKLLTFRIPYYVGPLARGKSDFAWLSRKSADKITPWNFDEIVDKESSAEAFINRMTNYDLYLPNQKVLPKHSLLYEKFTVYNELTKVKYKTEQGKTAFFDANMKQEIFDGVFKVYRKVTKDKLMDFLEKEFDEFRIVDLTGLDKENKVFNASYGTYHDLCKILDKDFLDNSKNEKILEDIVLTLTLFEDREMIRKRLENYSDLLTKEQVKKLERRHYTGWGRLSAELIHGIRNKESRKTILDYLIDDGNSNRNFMQLINDDALSFKEEIAKAQVIGETDNLNQVVSDIAGSPAIKKGILQSLKIVDELVKIMGHQPENIVVEMARENQFTNQGRRNSQQRLKGLTDSIKEFGSQILKEHPVENSQLQNDRLFLYYLQNGRDMYTGEELDIDYLSQYDIDHIIPQAFIKDNSIDNRVLTSSKENRGKSDDVPSKDVVRKMKSYWSKLLSAKLITQRKFDNLTKAERGGLTDDDKAGFIKRQLVETRQITKHVARILDERFNTETDENNKKIRQVKIVTLKSNLVSNFRKEFELYKVREINDYHHAHDAYLNAVIGKALLGVYPQLEPEFVYGDYPHFHGHKENKATAKKFFYSNIMNFFKKDDVRTDKNGEIIWKKDEHISNIKKVLSYPQVNIVKKVEEQTGGFSKESILPKGNSDKLIPRKTKKFYWDTKKYGGFDSPIVAYSILVIADIEKGKSKKLKTVKALVGVTIMEKMTFERDPVAFLERKGYRNVQEENIIKLPKYSLFKLENGRKRLLASARELQKGNEIVLPNHLGTLLYHAKNIHKVDEPKHLDYVDKHKDEFKELLDVVSNFSKKYTLAEGNLEKIKELYAQNNGEDLKELASSFINLLTFTAIGAPATFKFFDKNIDRKRYTSTTEILNATLIHQSITGLYETRIDLNKLGGD

SEQ ID NO: 429 - protein, 1388 aa, Streptococcus thermophilus
MTKPYSIGLDIGTNSVGWAVTTDNYKVPSKKMKVLGNTSKKYIKKNLLGVLLFDSGITAEGRRLKRTARRRYTRRRNRILYLQEIFSTEMATLDDAFFQRLDDSFLVPDDKRDSKYPIFGNLVEEKAYHDEFPTIYHLRKYLADSTKKADLRLVYLALAHMIKYRGHFLIEGEFNSKNNDIQKNFQDFLDTYNAIFESDLSLENSKQLEEIVKDKISKLEKKDRILKLFPGEKNSGIFSEFLKLIVGNQADFRKCFNLDEKASLHFSKESYDEDLETLLGYIGDDYSDVFLKAKKLYDAILLSGFLTVTDNETEAPLSSAMIKRYNEHKEDLALLKEYIRNISLKTYNEVFKDDTKNGYAGYIDGKTNQEDFYVYLKKLLAEFEGADYFLEKIDREDFLRKQRTFDNGSIPYQIHLQEMRAILDKQAKFYPFLAKNKERIEKILTFRIPYYVGPLARGNSDFAWSIRKRNEKITPWNFEDVIDKESSAEAFINRMTSFDLYLPEEKVLPKHSLLYETFNVYNELTKVRFIAESMRDYQFLDSKQKKDIVRLYFKDKRKVTDKDIIEYLHAIYGYDGIELKGIEKQFNSSLSTYHDLLNIINDKEFLDDSSNEAIIEEIIHTLTIFEDREMIKQRLSKFENIFDKSVLKKLSRRHYTGWGKLSAKLINGIRDEKSGNTILDYLIDDGISNRNFMQLIHDDALSFKKKIQKAQIIGDEDKGNIKEVVKSLPGSPAIKKGILQSIKIVDELVKVMGGRKPESIVVEMARENQYTNQGKSNSQQRLKRLEKSLKELGSKILKENIPAKLSKIDNNALQNDRLYLYYLQNGKDMYTGDDLDIDRLSNYDIDHIIPQAFLKDNSIDNKVLVSSASNRGKSDDVPSLEVVKKRKTFWYQLLKSKLISQRKFDNLTKAERGGLSPEDKAGFIQRQLVETRQITKHVARLLDEKFNNKKDENNRAVRTVKIITLKSTLVSQFRKDFELYKVREINDFHHAHDAYLNAVVASALLKKYPKLEPEFVYGDYPKYNSFRERKSATEKVYFYSNIMNIFKKSISLADGRVIERPLIEVNEETGESVWNKESDLATVRRVLSYPQVNVVKKVEEQNHGLDRGKPKGLFNANLSSKPKPNSNENLVGAKEYLDPKKYGGYAGISNSFTVLVKGTIEKGAKKKITNVLEFQGISILDRINYRKDKLNFLLEKGYKDIELIIELPKYSLFELSDGSRRMLASILSTNNKRGEIHKGNQIFLSQKFVKLLYHAKRISNTINENHRKYVENHKKEFEELFYYILEFNENYVGAKKNGKLLNSAFQSWQNHSIDELCSSFIGPTGSERKGLFELTSRGSAADFEFLGVKIPRYRDYTPSSLLKDATLIHQSVTGLYETRIDLAKLGEG

SEQ ID NO: 430 - protein, 984 aa, Campylobacter jejuni
MARILAFDIGISSIGWAFSENDELKDCGVRIFTKVENPKTGESLALPRRLARSARKRLARRKARLNHLKHLIANEFKLNYEDYQSFDESLAKAYKGSLISPYELRFRALNELLSKQDFARVILHIAKRRGYDDIKNSDDKEKGAILKAIKQNEEKLANYQSVGEYLYKEYFQKFKENSKEFTNVRNKKESYERCIAQSFLKDELKLIFKKQREFGFSFSKKFEEEVLSVAFYKRALKDFSHLVGNCSFFTDEKRAPKNSPLAFMFVALTRIINLLNNLKNTEGILYTKDDLNALLNEVLKNGTLTYKQTKKLLGLSDDYEFKGEKGTYFIEFKKYKEFIKALGEHNLSQDDLNEIAKDITLIKDEIKLKKALAKYDLNQNQIDSLSKLEFKDHLNISFKALKLVTPLMLEGKKYDEACNELNLKVAINEDKKDFLPAFNETYYKDEVTNPVVLRAIKEYRKVLNALLKKYGKVHKINIELAREVGKNHSQRAKIEKEQNENYKAKKDAELECEKLGLKINSKNILKLRLFKEQKEFCAYSGEKIKISDLQDEKMLEIDHIYPYSRSFDDSYMNKVLVFTKQNQEKLNQTPFEAFGNDSAKWQKIEVLAKNLPTKKQKRILDKNYKDKEQKNFKDRNLNDTRYIARLVLNYTKDYLDFLPLSDDENTKLNDTQKGSKVHVEAKSGMLTSALRHTWGFSAKDRNNHLHHAIDAVIIAYANNSIVKAFSDFKKEQESNSAELYAKKISELDYKNKRKFFEPFSGFRQKVLDKIDEIFVSKPERKKPSGALHEETFRKEEEFYQSYGGKEGVLKALELGKIRKVNGKIVKNGDMFRVDIFKHKKTNKFYAVPIYTMDFALKVLPNKAVARSKKGEIKDWILMDENYEFCFSLYKDSLILIQTKDMQEPEFVYYNAFTSSTVSLIVSKHDNKFETLSKNQKILFKNANEKEVIAKSIGIQNLKVFEKYIVSALGEVTKAEFRQREDFKK

SEQ ID NO: 431 - protein, 1056 aa, Pasteurella multocida
MQTTNLSYILGLDLGIASVGWAVVEINENEDPIGLIDVGVRIFERAEVPKTGESLALSRRLARSTRRLIRRRAHRLLLAKRFLKREGILSTIDLEKGLPNQAWELRVAGLERRLSAIEWGAVLLHLIKHRGYLSKRKNESQTNNKELGALLSGVAQNHQLLQSDDYRTPAELALKKFAKEEGHIRNQRGAYTHTFNRLDLLAELNLLFAQQHQFGNPHCKEHIQQYMTELLMWQKPALSGEAILKMLGKCTHEKNEFKAAKHTYSAERFVWLTKLNNLRILEDGAERALNEEERQLLINHPYEKSKLTYAQVRKLLGLSEQAIFKHLRYSKENAESATFMELKAWHAIRKALENQGLKDTWQDLAKKPDLLDEIGTAFSLYKTDEDIQQYLTNKVPNSVINALLVSLNFDKFIELSLKSLRKILPLMEQGKRYDQACREIYGHHYGEANQKTSQLLPAIPAQEIRNPVVLRTLSQARKVINAIIRQYGSPARVHIETGRELGKSFKERREIQKQQEDNRTKRESAVQKFKELFSDFSSEPKSKDILKFRLYEQQHGKCLYSGKEINIHRLNEKGYVEIDHALPFSRTWDDSFNNKVLVLASENQNKGNQTPYEWLQGKINSERWKNFVALVLGSQCSAAKKQRLLTQVIDDNKFIDRNLNDTRYIARFLSNYIQENLLLVGKNKKNVFTPNGQITALLRSRWGLIKARENNNRHHALDAIVVACATPSMQQKITRFIRFKEVHPYKIENRYEMVDQESGEIISPHFPEPWAYFRQEVNIRVFDNHPDTVLKEMLPDRPQANHQFVQPLFVSRAPTRKMSGQGHMETIKSAKRLAEGISVLRIPLTQLKPNLLENMVNKEREPALYAGLKARLAEFNQDPAKAFATPFYKQGGQQVKAIRVEQVQKSGVLVRENNGVADNASIVRTDVFIKNNKFFLVPIYTWQVAKGILPNKAIVAHKNEDEWEEMDEGAKFKFSLFPNDLVELKTKKEYFFGYYIGLDRATGNISLKEHDGEISKGKDGVYRVGVKLALSFEKYQVDELGKNRQICRPQQRQPVR

SEQ ID NO: 432 - protein, 1629 aa, Francisella novicida
MNFKILPIAIDLGVKNTGVFSAFYQKGTSLERLDNKNGKVYELSKDSYTLLMNNRTARRHQRRGIDRKQLVKRLFKLIWTEQLNLEWDKDTQQAISFLFNRRGFSFITDGYSPEYLNIVPEQVKAILMDIFDDYNGEDDLDSYLKLATEQESKISEIYNKLMQKILEFKLMKLCTDIKDDKVSTKTLKEITSYEFELLADYLANYSESLKTQKFSYTDKQGNLKELSYYHHDKYNIQEFLKRHATINDRILDTLLTDDLDIWNFNFEKFDFDKNEEKLQNQEDKDHIQAHLHHFVFAVNKIKSEMASGGRHRSQYFQEITNVLDENNHQEGYLKNFCENLHNKKYSNLSVKNLVNLIGNLSNLELKPLRKYFNDKIHAKADHWDEQKFTETYCHWILGEWRVGVKDQDKKDGAKYSYKDLCNELKQKVTKAGLVDFLLELDPCRTIPPYLDNNNRKPPKCQSLILNPKFLDNQYPNWQQYLQELKKLQSIQNYLDSFETDLKVLKSSKDQPYFVEYKSSNQQIASGQRDYKDLDARILQFIFDRVKASDELLLNEIYFQAKKLKQKASSELEKLESSKKLDEVIANSQLSQILKSQHTNGIFEQGTFLHLVCKYYKQRQRARDSRLYIMPEYRYDKKLHKYNNTGRFDDDNQLLTYCNHKPRQKRYQLLNDLAGVLQVSPNFLKDKIGSDDDLFISKWLVEHIRGFKKACEDSLKIQKDNRGLLNHKINIARNTKGKCEKEIFNLICKIEGSEDKKGNYKHGLAYELGVLLFGEPNEASKPEFDRKIKKFNSIYSFAQIQQIAFAERKGNANTCAVCSADNAHRMQQIKITEPVEDNKDKIILSAKAQRLPAIPTRIVDGAVKKMATILAKNIVDDNWQNIKQVLSAKHQLHIPIITESNAFEFEPALADVKGKSLKDRRKKALERISPENIFKDKNNRIKEFAKGISAYSGANLTDGDFDGAKEELDHIIPRSHKKYGTLNDEANLICVTRGDNKNKGNRIFCLRDLADNYKLKQFETTDDLEIEKKIADTIWDANKKDFKFGNYRSFINLTPQEQKAFRHALFLADENPIKQAVIRAINNRNRTFVNGTQRYFAEVLANNIYLRAKKENLNTDKISFDYFGIPTIGNGRGIAEIRQLYEKVDSDIQAYAKGDKPQASYSHLIDAMLAFCIAADEHRNDGSIGLEIDKNYSLYPLDKNTGEVFTKDIFSQIKITDNEFSDKKLVRKKAIEGFNTHRQMTRDGIYAENYLPILIHKELNEVRKGYTWKNSEEIKIFKGKKYDIQQLNNLVYCLKFVDKPISIDIQISTLEELRNILTTNNIAATAEYYYINLKTQKLHEYYIENYNTALGYKKYSKEMEFLRSLAYRSERVKIKSIDDVKQVLDKDSNFIIGKITLPFKKEWQRLYREWQNTTIKDDYEFLKSFFNVKSITKLHKKVRKDFSLPISTNEGKFLVKRKTWDNNFIYQILNDSDSRADGTKPFIPAFDISKNEIVEAIIDSFTSKNIFWLPKNIELQKVDNKNIFAIDTSKWFEVETPSDLRDIGIATIQYKIDNNSRPKVRVKLDYVIDDDSKINYFMNHSLLKSRYPDKVLEILKQSTIIEFESSGFNKTIKEMLGMKLAGIYNETSNN

SEQ ID NO: 433 - protein, 1371 aa, Lactobacillus buchneri
MKVNNYHIGLDIGTSSIGWVAIGKDGKPLRVKGKTAIGARLFQEGNPAADRRMFRTTRRRLSRRKWRLKLLEEIFDPYITPVDSTFFARLKQSNLSPKDSRKEFKGSMLFPDLTDMQYHKNYPTIYHLRHALMTQDKKFDIRMVYLAIHHIVKYRGNFLNSTPVDSFKASKVDFVDQFKKLNELYAAINPEESFKINLANSEDIGHQFLDPSIRKFDKKKQIPKIVPVMMNDKVTDRLNGKIASEIIHAILGYKAKLDVVLQCTPVDSKPWALKFDDEDIDAKLEKILPEMDENQQSIVAILQNLYSQVTLNQIVPNGMSLSESMIEKYNDHHDHLKLYKKLIDQLADPKKKAVLKKAYSQYVGDDGKVIEQAEFWSSVKKNLDDSELSKQIMDLIDAEKFMPKQRTSQNGVIPHQLHQRELDEIIEHQSKYYPWLVEINPNKHDLHLAKYKIEQLVAFRVPYYVGPMITPKDQAESAETVFSWMERKGTETGQITPWNFDEKVDRKASANRFIKRMTTKDTYLIGEDVLPDESLLYEKFKVLNELNMVRVNGKLLKVADKQAIFQDLFENYKHVSVKKLQNYIKAKTGLPSDPEISGLSDPEHFNNSLGTYNDFKKLFGSKVDEPDLQDDFEKIVEWSTVFEDKKILREKLNEITWLSDQQKDVLESSRYQGWGRLSKKLLTGIVNDQGERIIDKLWNTNKNFMQIQSDDDFAKRIHEANADQMQAVDVEDVLADAYTSPQNKKAIRQVVKVVDDIQKAMGGVAPKYISIEFTRSEDRNPRRTISRQRQLENTLKDTAKSLAKSINPELLSELDNAAKSKKGLTDRLYLYFTQLGKDIYTGEPINIDELNKYDIDHILPQAFIKDNSLDNRVLVLTAVNNGKSDNVPLRMFGAKMGHFWKQLAEAGLISKRKLKNLQTDPDTISKYAMHGFIRRQLVETSQVIKLVANILGDKYRNDDTKIIEITARMNHQMRDEFGFIKNREINDYHHAFDAYLTAFLGRYLYHRYIKLRPYFVYGDFKKFREDKVTMRNFNFLHDLTDDTQEKIADAETGEVIWDRENSIQQLKDVYHYKFMLISHEVYTLRGAMFNQTVYPASDAGKRKLIPVKADRPVNVYGGYSGSADAYMAIVRIHNKKGDKYRVVGVPMRALDRLDAAKNVSDADFDRALKDVLAPQLTKTKKSRKTGEITQVIEDFEIVLGKVMYRQLMIDGDKKFMLGSSTYQYNAKQLVLSDQSVKTLASKGRLDPLQESMDYNNVYTEILDKVNQYFSLYDMNKFRHKLNLGFSKFISFPNHNVLDGNTKVSSGKREILQEILNGLHANPTFGNLKDVGITTPFGQLQQPNGILLSDETKIRYQSPTGLFERTVSLKDL

SEQ ID NO: 434 - protein, 1334 aa, Listeria innocua
MKKPYTIGLDIGTNSVGWAVLTDQYDLVKRKMKIAGDSEKKQIKKNFWGVRLFDEGQTAADRRMARTARRRIERRRNRISYLQGIFAEEMSKTDANFFCRLSDSFYVDNEKRNSRHPFFATIEEEVEYHKNYPTIYHLREELVNSSEKADLRLVYLALAHIIKYRGNFLIEGALDTQNTSVDGIYKQFIQTYNQVFASGIEDGSLKKLEDNKDVAKILVEKVTRKEKLERILKLYPGEKSAGMFAQFISLIVGSKGNFQKPFDLIEKSDIECAKDSYEEDLESLLALIGDEYAELFVAAKNAYSAVVLSSIITVAETETNAKLSASMIERFDTHEEDLGELKAFIKLHLPKHYEEIFSNTEKHGYAGYIDGKTKQADFYKYMKMTLENIEGADYFIAKIEKENFLRKQRTFDNGAIPHQLHLEELEAILHQQAKYYPFLKENYDKIKSLVTFRIPYFVGPLANGQSEFAWLTRKADGEIRPWNIEEKVDFGKSAVDFIEKMTNKDTYLPKENVLPKHSLCYQKYLVYNELTKVRYINDQGKTSYFSGQEKEQIFNDLFKQKRKVKKKDLELFLRNMSHVESPTIEGLEDSFNSSYSTYHDLLKVGIKQEILDNPVNTEMLENIVKILTVFEDKRMIKEQLQQFSDVLDGVVLKKLERRHYTGWGRLSAKLLMGIRDKQSHLTILDYLMNDDGLNRNLMQLINDSNLSFKSIIEKEQVTTADKDIQSIVADLAGSPAIKKGILQSLKIVDELVSVMGYPPQTIVVEMARENQTTGKGKNNSRPRYKSLEKAIKEFGSQILKEHPTDNQELRNNRLYLYYLQNGKDMYTGQDLDIHNLSNYDIDHIVPQSFITDNSIDNLVLTSSAGNREKGDDVPPLEIVRKRKVFWEKLYQGNLMSKRKFDYLTKAERGGLTEADKARFIHRQLVETRQITKNVANILHQRFNYEKDDHGNTMKQVRIVTLKSALVSQFRKQFQLYKVRDVNDYHHAHDAYLNGVVANTLLKVYPQLEPEFVYGDYHQFDWFKANKATAKKQFYTNIMLFFAQKDRIIDENGEILWDKKYLDTVKKVMSYRQMNIVKKTEIQKGEFSKATIKPKGNSSKLIPRKTNWDPMKYGGLDSPNMAYAVVIEYAKGKNKLVFEKKIIRVTIMERKAFEKDEKAFLEEQGYRQPKVLAKLPKYTLYECEEGRRRMLASANEAQKGNQQVLPNHLVTLLHHAANCEVSDGKSLDYIESNREMFAELLAHVSEFAKRYTLAEANLNKINQLFEQNKEGDIKAIAQSFVDLMAFNAMGAPASFKFFETTIERKRYNNLKELLNSTIIYQSITGLYESRKRLDD

SEQ ID NO: 435 - protein, 1372 aa, Legionella pneumophila
MESSQILSPIGIDLGGKFTGVCLSHLEAFAELPNHANTKYSVILIDHNNFQLSQAQRRATRHRVRNKKRNQFVKRVALQLFQHILSRDLNAKEETALCHYLNNRGYTYVDTDLDEYIKDETTINLLKELLPSESEHNFIDWFLQKMQSSEFRKILVSKVEEKKDDKELKNAVKNIKNFITGFEKNSVEGHRHRKVYFENIKSDITKDNQLDSIKKKIPSVCLSNLLGHLSNLQWKNLHRYLAKNPKQFDEQTFGNEFLRMLKNFRHLKGSQESLAVRNLIQQLEQSQDYISILEKTPPEITIPPYEARTNTGMEKDQSLLLNPEKLNNLYPNWRNLIPGIIDAHPFLEKDLEHTKLRDRKRIISPSKQDEKRDSYILQRYLDLNKKIDKFKIKKQLSFLGQGKQLPANLIETQKEMETHFNSSLVSVLIQIASAYNKEREDAAQGIWFDNAFSLCELSNINPPRKQKILPLLVGAILSEDFINNKDKWAKFKIFWNTHKIGRTSLKSKCKEIEEARKNSGNAFKIDYEEALNHPEHSNNKALIKIIQTIPDIIQAIQSHLGHNDSQALIYHNPFSLSQLYTILETKRDGFHKNCVAVTCENYWRSQKTEIDPEISYASRLPADSVRPFDGVLARMMQRLAYEIAMAKWEQIKHIPDNSSLLIPIYLEQNRFEFEESFKKIKGSSSDKTLEQAIEKQNIQWEEKFQRIINASMNICPYKGASIGGQGEIDHIYPRSLSKKHFGVIFNSEVNLIYCSSQGNREKKEEHYLLEHLSPLYLKHQFGTDNVSDIKNFISQNVANIKKYISFHLLTPEQQKAARHALFLDYDDEAFKTITKFLMSQQKARVNGTQKFLGKQIMEFLSTLADSKQLQLEFSIKQITAEEVHDHRELLSKQEPKLVKSRQQSFPSHAIDATLTMSIGLKEFPQFSQELDNSWFINHLMPDEVHLNPVRSKEKYNKPNISSTPLFKDSLYAERFIPVWVKGETFAIGFSEKDLFEIKPSNKEKLFTLLKTYSTKNPGESLQELQAKSKAKWLYFPINKTLALEFLHHYFHKEIVTPDDTTVCHFINSLRYYTKKESITVKILKEPMPVLSVKFESSKKNVLGSFKHTIALPATKDWERLFNHPNFLALKANPAPNPKEFNEFIRKYFLSDNNPNSDIPNNGHNIKPQKHKAVRKVFSLPVIPGNAGTMMRIRRKDNKGQPLYQLQTIDDTPSMGIQINEDRLVKQEVLMDAYKTRNLSTIDGINNSEGQAYATFDNWLTLPVSTFKPEIIKLEMKPHSKTRRYIRITQSLADFIKTIDEALMIKPSDSIDDPLNMPNEIVCKNKLFGNELKPRDGKMKIVSTGKIVTYEFESDSTPQWIQTLYVTQLKKQP

SEQ ID NO: 436 - protein, 1082 aa, Neisseria lactamica
MAAFKPNPMNYILGLDIGIASVGWAMVEVDEEENPIRLIDLGVRVFERAEVPKTGDSLAMARRLARSVRRLTRRRAHRLLRARRLLKREGVLQDADFDENGLVKSLPNTPWQLRAAALDRKLTCLEWSAVLLHLVKHRGYLSQRKNEGETADKELGALLKGVADNAHALQTGDFRTPAELALNKFEKESGHIRNQRGDYSHTFSRKDLQAELNLLFEKQKEFGNPHVSDGLKEDIETLLMAQRPALSGDAVQKMLGHCTFEPAEPKAAKNTYTAERFIWLTKLNNLRILEQGSERPLTDTERATLMDEPYRKSKLTYAQARKLLGLEDTAFFKGLRYGKDNAEASTLMEMKAYHAISRALEKEGLKDKKSPLNLSTELQDEIGTAFSLFKTDKDITGRLKDRVQPEILEALLKHISFDKFVQISLKALRRIVPLMEQGKRYDEACAEIYGDHYCKKNAEEKIYLPPIPADEIRNPVVLRALSQARKVINCVVRRYGSPARIHIETAREVGKSFKDRKEIEKRQEENRKDREKAAAKFREYFPNFVGEPKSKDILKLRLYEQQHGKCLYSGKEINLVRLNEKGYVEIDHALPFSRTWDDSFNNKVLVLGSENQNKGNQTPYEYFNGKDNSREWQEFKARVETSRFPRSKKQRILLQKFDEEGFKERNLNDTRYVNRFLCQFVADHILLTGKGKRRVFASNGQITNLLRGFWGLRKVRTENDRHHALDAVVVACSTVAMQQKITRFVRYKEMNAFDGKTIDKETGEVLHQKAHFPQPWEFFAQEVMIRVFGKPDGKPEFEEADTPEKLRTLLAEKLSSRPEAVHEYVTPLFVSRAPNRKMSGQGHMETVKSAKRLDEGISVLRVPLTQLKLKGLEKMVNREREPKLYDALKAQLETHKDDPAKAFAEPFYKYDKAGSRTQQVKAVRIEQVQKTGVWVRNHNGIADNATMVRVDVFEKGGKYYLVPIYSWQVAKGILPDRAVVAFKDEEDWTVMDDSFEFRFVLYANDLIKLTAKKNEFLGYFVSLNRATGAIDIRTHDTDSTKGKNGIFQSVGVKTALSFQKNQIDELGKEIRPCRLKKRPPVR

SEQ ID NO: 437 - protein, 1082 aa, Neisseria meningitidis; identical to SEQ ID NO: 421

SEQ ID NO: 438 - protein, 1187 aa, Bifidobacterium longum
MLSRQLLGASHLARPVSYSYNVQDNDVHCSYGERCFMRGKRYRIGIDVGLNSVGLAAVEVSDENSPVRLLNAQSVIHDGGVDPQKNKEAITRKNMSGVARRTRRMRRRKRERLHKLDMLLGKFGYPVIEPESLDKPFEEWHVRAELATRYIEDDELRRESISIALRHMARHRGWRNPYRQVDSLISDNPYSKQYGELKEKAKAYNDDATAAEEESTPAQLVVAMLDAGYAEAPRLRWRTGSKKPDAEGYLPVRLMQEDNANELKQIFRVQRVPADEWKPLFRSVFYAVSPKGSAEQRVGQDPLAPEQARALKASLAFQEYRIANVITNLRIKDASAELRKLTVDEKQSIYDQLVSPSSEDITWSDLCDFLGFKRSQLKGVGSLTEDGEERISSRPPRLTSVQRIYESDNKIRKPLVAWWKSASDNEHEAMIRLLSNTVDIDKVREDVAYASAIEFIDGLDDDALTKLDSVDLPSGRAAYSVETLQKLTRQMLTTDDDLHEARKTLFNVTDSWRPPADPIGEPLGNPSVDRVLKNVNRYLMNCQQRWGNPVSVNIEHVRSSFSSVAFARKDKREYEKNNEKRSIFRSSLSEQLRADEQMEKVRESDLRRLEAIQRQNGQCLYCGRTITFRTCEMDHIVPRKGVGSTNTRTNFAAVCAECNRMKSNTPFAIWARSEDAQTRGVSLAEAKKRVTMFTFNPKSYAPREVKAFKQAVIARLQQTEDDAAIDNRSIESVAWMADELHRRIDWYFNAKQYVNSASIDDAEAETMKTTVSVFQGRVTASARRAAGIEGKIHFIGQQSKTRLDRRHHAVDASVIAMMNTAAAQTLMERESLRESQRLIGLMPGERSWKEYPYEGTSRYESFHLWLDNMDVLLELLNDALDNDRIAVMQSQRYVLGNSIAHDATIHPLEKVPLGSAMSADLIRRASTPALWCALTRLPDYDEKEGLPEDSHREIRVHDTRYSADDEMGFFASQAAQIAVQEGSADIGSAIHHARVYRCWKTNAKGVRKYFYGMIRVFQTDLLRACHDDLFTVPLPPQSISMRYGEPRVVQALQSGNAQYLGSLVVGDEIEMDFSSLDVDGQIGEYLQFFSQFSGGNLAWKHWVVDGFFNQTQLRIRPRYLAAEGLAKAFSDDVVPDGVQKIVTKQGWLPPVNTASKTAVRIVRRNAFGEPRLSSAHHMPCSWQWRHE

SEQ ID NO: 439 - protein, 1101 aa, Akkermansia muciniphila
MSRSLTFSFDIGYASIGWAVIASASHDDADPSVCGCGTVLFPKDDCQAFKRREYRRLRRNIRSRRVRIERIGRLLVQAQIITPEMKETSGHPAPFYLASEALKGHRTLAPIELWHVLRWYAHNRGYDNNASWSNSLSEDGGNGEDTERVKHAQDLMDKHGTATMAETICRELKLEEGKADAPMEVSTPAYKNLNTAFPRLIVEKEVRRILELSAPLIPGLTAEIIELIAQHHPLTTEQRGVLLQHGIKLARRYRGSLLFGQLIPRFDNRIISRCPVTWAQVYEAELKKGNSEQSARERAEKLSKVPTANCPEFYEYRMARILCNIRADGEPLSAEIRRELMNQARQEGKLTKASLEKAISSRLGKETETNVSNYFTLHPDSEEALYLNPAVEVLQRSGIGQILSPSVYRIAANRLRRGKSVTPNYLLNLLKSRGESGEALEKKIEKESKKKEADYADTPLKPKYATGRAPYARTVLKKVVEEILDGEDPTRPARGEAHPDGELKAHDGCLYCLLDTDSSVNQHQKERRLDTMTNNHLVRHRMLILDRLLKDLIQDFADGQKDRISRVCVEVGKELTTFSAMDSKKIQRELTLRQKSHTDAVNRLKRKLPGKALSANLIRKCRIAMDMNWTCPFTGATYGDHELENLELEHIVPHSFRQSNALSSLVLTWPGVNRMKGQRTGYDFVEQEQENPVPDKPNLHICSLNNYRELVEKLDDKKGHEDDRRRKKKRKALLMVRGLSHKHQSQNHEAMKEIGMTEGMMTQSSHLMKLACKSIKTSLPDAHIDMIPGAVTAEVRKAWDVFGVFKELCPEAADPDSGKILKENLRSLTHLHHALDACVLGLIPYIIPAHHNGLLRRVLAMRRIPEKLIPQVRPVANQRHYVLNDDGRMMLRDLSASLKENIREQLMEQRVIQHVPADMGGALLKETMQRVLSVDGSGEDAMVSLSKKKDGKKEKNQVKASKLVGVFPEGPSKLKALKAAIEIDGNYGVALDPKPVVIRHIKVFKRIMALKEQNGGKPVRILKKGMLIHLTSSKDPKHAGVWRIESIQDSKGGVKLDLQRAHCAVPKNKTHECNWREVDLISLLKKYQMKRYPTSYTGTPR

SEQ ID NO: 440 - protein, 1498 aa, Odoribacter laneus
METTLGIDLGTNSIGLALVDQEEHQILYSGVRIFPEGINKDTIGLGEKEESRNATRRAKRQMRRQYFRKKLRKAKLLELLIAYDMCPLKPEDVRRWKNWDKQQKSTVRQFPDTPAFREWLKQNPYELRKQAVTEDVTRPELGRILYQMIQRRGFLSSRKGKEEGKIFTGKDRMVGIDETRKNLQKQTLGAYLYDIAPKNGEKYRFRTERVRARYTLRDMYIREFEIIWQRQAGHLGLAHEQATRKKNIFLEGSATNVRNSKLITHLQAKYGRGHVLIEDTRITVTFQLPLKEVLGGKIEIEEEQLKFKSNESVLFWQRPLRSQKSLLSKCVFEGRNFYDPVHQKWIIAGPTPAPLSHPEFEEFRAYQFINNIIYGKNEHLTAIQREAVFELMCTESKDFNFEKIPKHLKLFEKFNFDDTTKVPACTTISQLRKLFPHPVWEEKREEIWHCFYFYDDNTLLFEKLQKDYALQTNDLEKIKKIRLSESYGNVSLKAIRRINPYLKKGYAYSTAVLLGGIRNSFGKRFEYFKEYEPEIEKAVCRILKEKNAEGEVIRKIKDYLVHNRFGFAKNDRAFQKLYHHSQAITTQAQKERLPETGNLRNPIVQQGLNELRRTVNKLLATCREKYGPSFKFDHIHVEMGRELRSSKTEREKQSRQIRENEKKNEAAKVKLAEYGLKAYRDNIQKYLLYKEIEEKGGTVCCPYTGKTLNISHTLGSDNSVQIEHIIPYSISLDDSLANKTLCDATFNREKGELTPYDFYQKDPSPEKWGASSWEEIEDRAFRLLPYAKAQRFIRRKPQESNEFISRQLNDTRYISKKAVEYLSAICSDVKAFPGQLTAELRHLWGLNNILQSAPDITFPLPVSATENHREYYVITNEQNEVIRLFPKQGETPRTEKGELLLTGEVERKVFRCKGMQEFQTDVSDGKYWRRIKLSSSVTWSPLFAPKPISADGQIVLKGRIEKGVFVCNQLKQKLKTGLPDGSYWISLPVISQTFKEGESVNNSKLTSQQVQLFGRVREGIFRCHNYQCPASGADGNFWCTLDTDTAQPAFTPIKNAPPGVGGGQIILTGDVDDKGIFHADDDLHYELPASLPKGKYYGIFTVESCDPTLIPIELSAPKTSKGENLIEGNIWVDEHTGEVRFDPKKNREDQRHHAIDAIVIALSSQSLFQRLSTYNARRENKKRGLDSTEHFPSPWPGFAQDVRQSVVPLLVSYKQNPKTLCKISKTLYKDGKKIHSCGNAVRGQLHKETVYGQRTAPGATEKSYHIRKDIRELKTSKHIGKVVDITIRQMLLKHLQENYHIDITQEFNIPSNAFFKEGVYRIFLPNKHGEPVPIKKIRMKEELGNAERLKDNINQYVNPRNNHHVMIYQDADGNLKEEIVSFWSVIERQNQGQPIYQLPREGRNIVSILQINDTFLIGLKEEEPEVYRNDLSTLSKHLYRVQKLSGMYYTFRHHLASTLNNEREEFRIQSLEAWKRANPVKVQIDEIGRITFLNGPLC

SEQ ID NO: 441 - protein, 1300 aa, Francisella tularensis subsp. Novicida
MSIYQEFVNKYSLSKTLRFELIPQGKTLENIKARGLILDDEKRAKDYKKAKQIIDKYHQFFIEEILSSVCISEDLLQNYSDVYFKLKKSDDDNLQKDFKSAKDTIKKQISEYIKDSEKFKNLFNQNLIDAKKGQESDLILWLKQSKDNGIELFKANSDITDIDEALEIIKSFKGWTTYFKGFHENRKNVYSSNDIPTSIIYRIVDDNLPKFLENKAKYESLKDKAPEAINYEQIKKDLAEELTFDIDYKTSEVNQRVFSLDEVFEIANFNNYLNQSGITKFNTIIGGKFVNGENTKRKGINEYINLYSQQINDKTLKKYKMSVLFKQILSDTESKSFVIDKLEDDSDVVTTMQSFYEQIAAFKTVEEKSIKETLSLLFDDLKAQKLDLSKIYFKNDKSLTDLSQQVFDDYSVIGTAVLEYITQQIAPKNLDNPSKKEQELIAKKTEKAKYLSLETIKLALEEFNKHRDIDKQCRFEEILANFAAIPMIFDEIAQNKDNLAQISIKYQNQGKKDLLQASAEDDVKAIKDLLDQTNNLLHKLKIFHISQSEDKANILDKDEHFYLVFEECYFELANIVPLYNKIRNYITQKPYSDEKFKLNFENSTLANGWDKNKEPDNTAILFIKDDKYYLGVMNKKNNKIFDDKAIKENKGEGYKKIVYKLLPGANKMLPKVFFSAKSIKFYNPSEDILRIRNHSTHTKNGSPQKGYEKFEFNIEDCRKFIDFYKQSISKHPEWKDFGFRFSDTQRYNSIDEFYREVENQGYKLTFENISESYIDSVVNQGKLYLFQIYNKDFSAYSKGRPNLHTLYWKALFDERNLQDVVYKLNGEAELFYRKQSIPKKITHPAKEAIANKNKDNPKKESVFEYDLIKDKRFTEDKFFFHCPITINFKSSGANKFNDEINLLLKEKANDVHILSIDRGERHLAYYTLVDGKGNIIKQDTFNIIGNDRMKTNYHDKLAAIEKDRDSARKDWKKINNIKEMKEGYLSQVVHEIAKLVIEYNAIVVFEDLNFGFKRGRFKVEKQVYQKLEKMLIEKLNYLVFKDNEFDKTGGVLRAYQLTAPFETFKKMGKQTGIIYYVPAGFTSKICPVTGFVNQLYPKYESVSKSQEFFSKFDKICYNLDKGYFEFSFDYKNFGDKAAKGKWTIASFGSRLINFRNSDKNHNWDTREVYPTKELEKLLKDYSIEYGHGECIKAAICGESDKKFFAKLTSVLNTILQMRNSKTGTELDYLISPVADVNGNFFDSRQAPKNMPQDADANGAYHIGLKGLMLLGRIKNNQEGKKLNLVIKNEEYFEFVQNRNN

SEQ ID NO: 442 - protein, 1228 aa, Lachnospiraceae bacterium sp. ND2006
AASKLEKFTNCYSLSKTLRFKAIPVGKTQENIDNKRLLVEDEKRAEDYKGVKKLLDRYYLSFINDVLHSIKLKNLNNYISLFRKKTRTEKENKELENLEINLRKEIAKAFKGAAGYKSLFKKDIIETILPEAADDKDEIALVNSFNGFTTAFTGFFDNRENMFSEEAKSTSIAFRCINENLTRYISNMDIFEKVDAIFDKHEVQEIKEKILNSDYDVEDFFEGEFFNFVLTQEGIDVYNAIIGGFVTESGEKIKGLNEYINLYNAKTKQALPKFKPLYKQVLSDRESLSFYGEGYTSDEEVLEVFRNTLNKNSEIFSSIKKLEKLFKNFDEYSSAGIFVKNGPAISTISKDIFGEWNLIRDKWNAEYDDIHLKKKAVVTEKYEDDRRKSFKKIGSFSLEQLQEYADADLSVVEKLKEIIIQKVDEIYKVYGSSEKLFDADFVLEKSLKKNDAVVAIMKDLLDSVKSFENYIKAFFGEGKETNRDESFYGDFVLAYDILLKVDHIYDAIRNYVTQKPYSKDKFKLYFQNPQFMGGWDKDKETDYRATILRYGSKYYLAIMDKKYAKCLQKIDKDDVNGNYEKINYKLLPGPNKMLPKVFFSKKWMAYYNPSEDIQKIYKNGTFKKGDMFNLNDCHKLIDFFKDSISRYPKWSNAYDFNFSETEKYKDIAGFYREVEEQGYKVSFESASKKEVDKLVEEGKLYMFQIYNKDFSDKSHGTPNLHTMYFKLLFDENNHGQIRLSGGAELFMRRASLKKEELVVHPANSPIANKNPDNPKKTTTLSYDVYKDKRFSEDQYELHIPIAINKCPKNIFKINTEVRVLLKHDDNPYVIGIDRGERNLLYIVVVDGKGNIVEQYSLNEIINNFNGIRIKTDYHSLLDKKEKERFEARQNWTSIENIKELKAGYISQVVHKICELVEKYDAVIALEDLNSGFKNSRVKVEKQVYQKFEKMLIDKLNYMVDKKSNPCATGGALKGYQITNKFESFKSMSTQNGFIFYIPAWLTSKIDPSTGFVNLLKTKYTSIADSKKFISSFDRIMYVPEEDLFEFALDYKNFSRTDADYIKKWKLYSYGNRIRIFAAAKKNNVFAWEEVCLTSAYKELFNKYGINYQQGDIRALLCEQSDKAFYSSFMALMSLMLQMRNSITGRTDVDFLISPVKNSDGIFYDSRNYEAQENAILPKNADANGAYNIARKVLWAIGQFKKAEDEKLDKVKIAISNKEWLEYAQTSVK

SEQ ID NO: 443 - protein, 1307 aa, Acidaminococcus sp. BV3L6
MTQFEGFTNLYQVSKTLRFELIPQGKTLKHIQEQGFIEEDKARNDHYKELKPIIDRIYKTYADQCLQLVQLDWENLSAAIDSYRKEKTEETRNALIEEQATYRNAIHDYFIGRTDNLTDAINKRHAEIYKGLFKAELFNGKVLKQLGTVTTTEHENALLRSFDKFTTYFSGFYENRKNVFSAEDISTAIPHRIVQDNFPKFKENCHIFTRLITAVPSLREHFENVKKAIGIFVSTSIEEVFSFPFYNQLLTQTQIDLYNQLLGGISREAGTEKIKGLNEVLNLAIQKNDETAHIIASLPHRFIPLFKQILSDRNTLSFILEEFKSDEEVIQSFCKYKTLLRNENVLETAEALFNELNSIDLTHIFISHKKLETISSALCDHWDTLRNALYERRISELTGKITKSAKEKVQRSLKHEDINLQEIISAAGKELSEAFKQKTSEILSHAHAALDQPLPTTLKKQEEKEILKSQLDSLLGLYHLLDWFAVDESNEVDPEFSARLTGIKLEMEPSLSFYNKARNYATKKPYSVEKFKLNFQMPTLASGWDVNKEKNNGAILFVKNGLYYLGIMPKQKGRYKALSFEPTEKTSEGFDKMYYDYFPDAAKMIPKCSTQLKAVTAHFQTHTTPILLSNNFIEPLEITKEIYDLNNPEKEPKKFQTAYAKKTGDQKGYREALCKWIDFTRDFLSKYTKTTSIDLSSLRPSSQYKDLGEYYAELNPLLYHISFQRIAEKEIMDAVETGKLYLFQIYNKDFAKGHHGKPNLHTLYWTGLFSPENLAKTSIKLNGQAELFYRPKSRMKRMAHRLGEKMLNKKLKDQKTPIPDTLYQELYDYVNHRLSHDLSDEARALLPNVITKEVSHEIIKDRRFTSDKFFFHVPITLNYQAANSPSKFNQRVNAYLKEHPETPIIGIDRGERNLIYITVIDSTGKILEQRSLNTIQQFDYQKKLDNREKERVAARQAWSVVGTIKDLKQGYLSQVIHEIVDLMIHYQAVVVLENLNFGFKSKRTGIAEKAVYQQFEKMLIDKLNCLVLKDYPAEKVGGVLNPYQLTDQFTSFAKMGTQSGFLFYVPAPYTSKIDPLTGFVDPFVWKTIKNHESRKHFLEGFDFLHYDVKTGDFILHFKMNRNLSFQRGLPGFMPAWDIVFEKNETQFDAKGTPFIAGKRIVPVIENHRFTGRYRDLYPANELIALLEEKGIVFRDGSNILPKLLENDDSHAIDTMVALIRSVLQMRNSNAATGEDYINSPVRDLNGVCFDSRFQNPEWPMDADANGAYHIALKGQLLLNHLKESKDLKLQNGISNQDWLAYIQELRN

SEQ ID NO: 444 - DNA, 28 bp, Leptotrichia shahii
ccaccccaatatcgaaggggactaaaac

SEQ ID NO: 445 - DNA, 36 bp, Leptotrichia wadei
gatttagactaccccaaaaacgaaggggactaaaac

SEQ ID NO: 446 - DNA, 36 bp, Listeria seeligeri
gtaagagactacctctatatgaaagaggactaaaac

SEQ ID NO: 447 - DNA, 35 bp, Lachnospiraceae bacterium MA2020
gtattgagaaaagccagatatagttggcaatagac

SEQ ID NO: 448 - DNA, 35 bp, Lachnospiraceae bacterium NK4A179
gttgatgagaagagcccaagatagagggcaataac

SEQ ID NO: 449 - DNA, 35 bp, Clostridium aminophilum DSM 10710
gtctattgccctctatatcgggctgttctccaaac

SEQ ID NO: 450 - DNA, 36 bp, Carnobacterium gallinarum DSM 4847
attaaagactacctctaaatgtaagaggactataac

SEQ ID NO: 451 - DNA, 36 bp, Carnobacterium gallinarum DSM 4847
aatataaactacctctaaatgtaagaggactataac

SEQ ID NO: 452 - DNA, 36 bp, Paludibacter propionicigenes WB4
cttgtggattatcccaaaattgaagggaactacaac

SEQ ID NO: 453 - DNA, 36 bp, Listeria weihenstephanensis FSL R9-0317
gatttagagtacctcaaaatagaagaggtctaaaac

SEQ ID NO: 454 - DNA, 36 bp, Listeriaceae bacterium FSL M6-0635
gatttagagtacctcaaaacaaaagaggactaaaac

SEQ ID NO: 455 - DNA, 36 bp, Leptotrichia wadei F0279
gatatagataaccccaaaaacgaagggatctaaaac

SEQ ID NO: 456 - DNA, 36 bp, Rhodobacter capsulatus SB 1003
gcctcacatcaccgccaagacgacggcggactgaac

SEQ ID NO: 457 - DNA, 36 bp, Rhodobacter capsulatus R121; identical to SEQ ID NO: 456

SEQ ID NO: 458 - DNA, 36 bp, Rhodobacter capsulatus DE442; identical to SEQ ID NO: 456

SEQ ID NO: 459 - protein, 1389 aa, Artificial Sequence
  Cas13a
MGNLFGHKRWYEVRDKKDFKIKRKVKVKRNYDGNKYILNINENNNKEKIDNNKFIRKYINYKKNDNILKEFTRKFHAGNILFKLKGKEGIIRIENNDDFLETEEVVLYIEAYGKSEKLKALGITKKKIIDEAIRQGITKDDKKIEIKRQENEEEIEIDIRDEYTNKTLNDCSIILRIIENDELETKKSIYEIFKNINMSLYKIIEKIIENETEKVFENRYYEEHLREKLLKDDKIDVILTNFMEIREKIKSNLEILGFVKFYLNVGGDKKKSKNKKMLVEKILNINVDLTVEDIADFVIKELEFWNITKRIEKVKKVNNEFLEKRRNRTYIKSYVLLDKHEKFKIERENKKDKIVKFFVENIKNNSIKEKIEKILAEFKIDELIKKLEKELKKGNCDTEIFGIFKKHYKVNFDSKKFSKKSDEEKELYKIIYRYLKGRIEKILVNEQKVRLKKMEKIEIEKILNESILSEKILKRVKQYTLEHIMYLGKLRHNDIDMTTVNTDDFSRLHAKEELDLELITFFASTNMELNKIFSRENINNDENIDFFGGDREKNYVLDKKILNSKIKIIRDLDFIDNKNNITNNFIRKFTKIGTNERNRILHAISKERDLQGTQDDYNKVINIIQNLKISDEEVSKALNLDVVFKDKKNIITKINDIKISEENNNDIKYLPSFSKVLPEILNLYRNNPKNEPFDTIETEKIVLNALIYVNKELYKKLILEDDLEENESKNIFLQELKKTLGNIDEIDENIIENYYKNAQISASKGNNKAIKKYQKKVIECYIGYLRKNYEELFDFSDFKMNIQEIKKQIKDINDNKTYERITVKTSDKTIVINDDFEYIISIFALLNSNAVINKIRNRFFATSVWLNTSEYQNIIDILDEIMQLNTLRNECITENWNLNLEEFIQKMKEIEKDFDDFKIQTKKEIFNNYYEDIKNNILTEFKDDINGCDVLEKKLEKIVIFDDETKFEIDKKSNILQDEQRKLSNINKKDLKKKVDQYIKDKDQEIKSKILCRIIFNSDFLKKYKKEIDNLIEDMESENENKFQEIYYPKERKNELYIYKKNLFLNIGNPNFDKIYGLISNDIKMADAKFLFNIDGKNIRKNKISEIDAILKNLNDKLNGYSKEYKEKYIKKLKENDDFFAKNIQNKNYKSFEKDYNRVSEYKKIRDLVEFNYLNKIESYLIDINWKLAIQMARFERDMHYIVNGLRELGIIKLSGYNTGISRAYPKRNGSDGFYTTTAYYKFFDEESYKKFEKICYGFGIDLSENSEINKPENESIRNYISHFYIVRNPFADYSIAEQIDRVSNLLSYSTRYNNSTYASVFEVFKKDVNLDYDELKKKFKLIGNNDILERLMKPKKVSVLELESYNSDYIKNLIIELLTKIENTNDTL

SEQ ID NO: 460 - protein, 1221 aa, Bergeyella zoohelcum ATCC 43767
MENKTSLGNNIYYNPFKPQDKSYFAGYFNAAMENTDSVFRELGKRLKGKEYTSENFFDAIFKENISLVEYERYVKLLSDYFPMARLLDKKEVPIKERKENFKKNFKGIIKAVRDLRNFYTHKEHGEVEITDEIFGVLDEMLKSTVLTVKKKKVKTDKTKEILKKSIEKQLDILCQKKLEYLRDTARKIEEKRRNQRERGEKELVAPFKYSDKRDDLIAAIYNDAFDVYIDKKKDSLKESSKAKYNTKSDPQQEEGDLKIPISKNGVVFLLSLFLTKQEIHAFKSKIAGFKATVIDEATVSEATVSHGKNSICFMATHEIFSHLAYKKLKRKVRTAEINYGEAENAEQLSVYAKETLMMQMLDELSKVPDVVYQNLSEDVQKTFIEDWNEYLKENNGDVGTMEEEQVIHPVIRKRYEDKFNYFAIRFLDEFAQFPTLRFQVHLGNYLHDSRPKENLISDRRIKEKITVFGRLSELEHKKALFIKNTETNEDREHYWEIFPNPNYDFPKENISVNDKDFPIAGSILDREKQPVAGKIGIKVKLLNQQYVSEVDKAVKAHQLKQRKASKPSIQNIIEEIVPINESNPKEAIVFGGQPTAYLSMNDIHSILYEFFDKWEKKKEKLEKKGEKELRKEIGKELEKKIVGKIQAQIQQIIDKDTNAKILKPYQDGNSTAIDKEKLIKDLKQEQNILQKLKDEQTVREKEYNDFIAYQDKNREINKVRDRNHKQYLKDNLKRKYPEAPARKEVLYYREKGKVAVWLANDIKRFMPTDFKNEWKGEQHSLLQKSLAYYEQCKEELKNLLPEKVFQHLPFKLGGYFQQKYLYQFYTCYLDKRLEYISGLVQQAENFKSENKVFKKVENECFKFLKKQNYTHKELDARVQSILGYPIFLERGFMDEKPTIIKGKTFKGNEALFADWFRYYKEYQNFQTFYDTENYPLVELEKKQADRKRKTKIYQQKKNDVFTLLMAKHIFKSVFKQDSIDQFSLEDLYQSREERLGNQERARQTGERNTNYIWNKTVDLKLCDGKITVENVKLKNVGDFIKYEYDQRVQAFLKYEENIEWQAFLIKESKEEENYPYVVEREIEQYEKVRREELLKEVHLIEEYILEKVKDKEILKKGDNQNFKYYILNGLLKQLKNEDVESYKVFNLNTEPEDVNINQLKQEATDLEQKAFVLTYIRNKFAHNQLPKKEFWDYCQEKYGKEKTYAEYFAEVFKKEKEALIK

SEQ ID NO: 461 - DNA, 30 bp, Artificial Sequence
  CasRx Direct Repeat
aacccctaccaactggtcggggtttgaaac

SEQ ID NO: 462 - DNA, 26 bp, Homo sapiens
caacgagtcttttgtcatctacatgt

SEQ ID NO: 463 - DNA, 26 bp, Homo sapiens
cgccagcgtggcattctacatcttca

SEQ ID NO: 464 - DNA, 26 bp, Homo sapiens
catctatatcatgatgaacaagcagt

SEQ ID NO: 465 - DNA, 26 bp, Homo sapiens
acatgtagatgacaaaagactcgttg

SEQ ID NO: 466 - DNA, 26 bp, Homo sapiens
actgcttgttcatcatgatatagatg

SEQ ID NO: 467 - protein, 954 aa, Eubacterium siraeum; identical to SEQ ID NO: 1

SEQ ID NO: 468 - protein, 919 aa, Ruminococcus sp; identical to SEQ ID NO: 3

SEQ ID NO: 469 - protein, 918 aa, Ruminococcus bicirculans; identical to SEQ ID NO: 104

SEQ ID NO: 470 - protein, 922 aa, Ruminococcus sp; identical to SEQ ID NO: 107

SEQ ID NO: 471 - protein, 922 aa, Ruminococcus sp; identical to SEQ ID NO: 109

SEQ ID NO: 472 - protein, 933 aa, Ruminococcus flavefaciens; identical to SEQ ID NO: 62

SEQ ID NO: 473 - protein, 944 aa, Ruminococcus albus; identical to SEQ ID NO: 70

SEQ ID NO: 474 - protein, 967 aa, Ruminococcus flavefaciens; identical to SEQ ID NO: 92

SEQ ID NO: 475 - protein, 796 aa, Ruminococcus sp
MEINTSNPTHRSGESSSVRGDMLGLKSELEKRFFGKTFDDNIHIQLIYNILDIEKILAVYVTNIVYALNNMLGVKGSESYDDFMGYLSAQNTYYIFTHPDKSNLSDKVKGNIKKSLSKFNDLLKTKRLGYFGLEEPKTKDKRVSEAYKKRVYHMLAIVGQIRQSVFHDKSNELDEYLYSFIDIIDSEYRDTLDYLVDERFDSINKGFVQGNKVNISLLIDMMKGYEADDIIRLYYDFIVLKSQKNLGFSIKKLREKMLDEYGFRFKDKQYDSVRSKMYKLMDFLLFCNYYRNDVVAGEALVRKLRFSMTDDEKEGIYADEAEKLWGKFRNDFENIADHMNGDVIKELGKADMDFDEKILDSEKKNASDLLYFSKMIYMLTYFLDGKEINDLLTTLISKFDNIKEFLKIMKSSAVDVECELTAGYKLFNDSQRITNELFIVKNIASMRKPAASAKLTMFRDALTILGIDDKITDDRISEILKLKEKGKGIHGLRNFITNNVIESSRFVYLIKYANAQKIREVAKNEKVVMFVLGGIPDTQIERYYKSCVEFPDMNSSLEAKCSELARMIKNISFDDFKNVKQQAKGRENVAKERAKAVIGLYLTVMYLLVKNLVNVNARYVIAIHCLERDFGLYKEIIPELASKNLKNDYRILSQTLCELCDDRDESPNLFLKKNKRLRKCVEVDINNADSSMTRKYRNCIAHLTVVRELKEYIGDIRTVDSYFSIYHYVMQRCITKREDDTKQEEKIKYEDDLLKNHGYTKDFVKALNSPFGYNIPRFKNLSIEQLFDRNEYLTEK

SEQ ID NO: 476 - protein, 412 aa, Artificial Sequence
  RtcB homolog
MIVLEIIGERNTAVVYGEIIDECAVSQIEEICNHPAFENSRIRIMPDCHAGKGCVIGFTCVTSNRMIVPNIVGVDIGCGILTTVFTADREIDYRALDTFIRSNIPSGMEIHDSVSDTVAENTALIAKVNGICDAIGESADVDYHLRSIGTLGGGNHFIEIDRLNNGNYALTVHTGSRNLGKRICGYFQSNASVIDTELRRSILLRHRSATTSEEHEEIDRRAAQIAPVSKELAFITGERYDSYIGCMLDAKALAAFNRTVISDRIMSFLADEYGVEIKDRFDTVHNYIDWYDDTHTSVVIRKGAISARKGERIVIPLNMRDGIIIAHGRGNEEWNCSAPHGSGRAYSRSDARRTFTLEEYVEEMDGVNTWSVSESTIDECPMAYKPSEMIIGSIGDTVEIESIAHTVYNFKA

SEQ ID NO: 477 - protein, 831 aa, Artificial Sequence
  WYL Eubacterium siraeum + C-term NLS
MKKTEKFDDVQSGYEYKYFLESIDKYRAAVQNIYTYGCFNQKQLSEQCNCSDQTIKKAFNFYNLCLANYIKKKKGTLSKKAKGRPTEAKYLEYDRFTLNENYLYNIYLWARITKKQMWAFSYFRRHTSLLINASRTEIKNQLSDFFLYFSEYMDRSKKAENSQDLGYIIDMTAPTEKNMLISSMCDALAVFGRKAPYSVPAYSISHKLKKLCGNDSKSLWSFMYDNYDRILYDEAVYTIRQAIRDRKLIGYQTVGTEKQKSVNYVVPLKIMYEYNLGRCYLLYSPLNSDSIIKSIRLDKLYKVAAYEPDSIINYEKLYDVLAVAENEIWLSGDYTKKDCLSRIVLKNVKPQAFSLIEKYGVCYTEDREAKTVTFNIRKADDIKPFIRTLGGDAVISEEDNPGLFREFAYDARIGRQMYYDDSFADCPAEKDSQPAKDSKTASGNDNIKKYASYPTLRLFNKYGSFMNILAEELAEHIFSEIIRMPVEKRAGQIEYSSNRLERVLNSYFKIYGFDELRTEASNITEWFTKATEELSDSDYSSWFSVNGGKFEAVADLNEYEHKQLLTNIEYEYLRLMLGDPDARAIIGNEYCEKLSEYVGSADTTLDEFFTVRYANRNEKTIENKHSVLRTIMRAMNNEKKADIEYKGKHYICSAYRFTYSLRERKHRLMVFDGNYIMQINLCDIKDAQMTKEPSLSDEEMNKLLTERKKYIEIAIPQNADAQQRNVFERALRLFGGFERYSWNDAKNGEYVIAVAYYEPDISVSSSADRRIYRRDTVAADIMSLGRYARVMKQPGFELDGVRYDSSLYDYISKNYSGTAARYEKPKKKRKV

SEQ ID NO: 478 - protein, 396 aa, Artificial Sequence
  WYL Ruminococcus sp.isolate 2789STDY5834971 + C-term NLS
MLILPSTFLPKRDKNVPYIAEVQSIPLSPSAYSVIIKDKSIFETSLSPNGSVSMSSFLTSIFDSAYIASLKYKSEKYNGIPLLNAFVKWQIEEINDGLDDKSKEIIKSYLISKLSAKYEKTKTENAVRVRLSICRDLYDTLSSDDLYYENKVYSSTLRRFLKAVYEDYALLSDCERERLIFADNIIKINEVIKQNGSRYYSFIYAYSNMYSREKRRIRLIPYRIVSDEYKMYNYLVCLSDEKSAGKEFKADSYRISRLSGLSIAEKLSQKEYSSVTEYERLKEGHVKSVKHLLSDPRFGSDESDISKVYLTEKGVEMFGKILYQRPILKGNEKPKPNAVNEFISPPIQVKYYFNKFGKDGVILSPSDSFEEMRTLYVEGAEAYNREVEMPKKKRKV

SEQ ID NO: 479 - protein, 399 aa, Artificial Sequence
  WYL Ruminococcus bicirculans + C-term NLS
MSMTPSTFLPKREDGVPYIAEVQSIPLSPSAYSVIIKDKSIFETSLSPNGSVSMSSFLTSIFDSAYIASLKYKSDDNYKYIGIPLLNAFVKWQIEEIDDSLDDKSKEIIKSYLISKLSAKYEKTKTENAVRVRLSICRDLYDTLSSDDLYYENKVYSSTLRRFLKAVYEDYALLSDCERERLIFADNIIKINEVIKQNGSRYYSFIYAYSNMYSREKRRIRLIPYRIVSDEYKMYNYLVCLSDEKSAGKEFKADSYRISRLSGLSIAEKLSQKEYSSVTEYERLKEGHVKSVKHLLSDPRFGSDESDISKVYLTEKGVEMFGKILYQRPILKGNEKPKPNAVNEFISPPIQVKYYFNKFGKDGVILSPSDSFEEMRTLYVEGAEAYNREVEMPKKKRKV

SEQ ID NO: 480 - protein, 399 aa, Artificial Sequence
  WYL Ruminococcus sp. isolate 2789STDY5608892 + C-term NLS
MLIPPSTFLPKRDKNVPYIAEVQSIPLSPSAYSVIIKDKSIFETSLSPNGSVSMSSFLTSIFDSAYIASLKYKSDDNYKYIGIPLLNAFVEWQIEEIDDSLDDKSKEIIKSYLISKLSAKYEKTKTENAVRVRLSICRDLYDTLSSDDLYYENKVYSLTLRRFLKAVYEDYALLSDCERERLIFADNIIKINEVIKQNGSRYYSFIYAYSNMYSREKRRIRLIPYRIVSDEYKMYNYLVCLSDEKSAGKEFKADSYRISRLSGLSIAEKLSQKEYSSVTEYERLKEGHVKSVKHLLSDPRFGSDESDISKVYLTEKGVEMFGKILYQRPILKGNEKPKPNTVNEFISPPIQVKYYFNKFGKDGVILSPSDSFEEMRTLYVEGAEAYNREVEMPKKKRKV

SEQ ID NO: 481 - protein, 399 aa, Artificial Sequence; identical to SEQ ID NO: 480
  WYL Ruminococcus sp. CAG:57 + C-term NLS

SEQ ID NO: 482 - protein, 287 aa, Artificial Sequence
  WYL Ruminococcus flavefaciens FD-1 + C-term NLS
MIIAINQWKRRFSLVIYGKSEGETIVKIKLLLISLAYLISIYLLCSPGCIGIFTHGMLTTVIGVVTMLAATGTYGMYLYSSAIGERSLPEIPMNKETEYSRYKELENWFRAFRYLDRNNNFAMLSSDLATSYHDGLIRDNPFRNTELGDRLQTTSSDISIKYDQTLKILSESFEKNDITYQNYLSVLDNVLKLSSSHLKAIKKRVCVFDYRTWADNKNDEMCRKYIEEVKSSVIRLEEIEGKFDNLLHELICLSEISEDPLLEMQDLIETTSDYKSIEDQPKKKRKV

SEQ ID NO: 483 - protein, 233 aa, Artificial Sequence
  WYL Ruminococcus albus strain KH2T6 + C-term NLS
MCTWYYAEAKSLSFFIDKASQLPLSDIIMNTMSKSKAMSGNIRPTDMAAVLAPNKQGNVAVFPMIWGFTHESTSKPVINCRIESADTKPLWKDSWYRRRCVIPASWYYEWGVPPSEGELYHKNEYNKIQKEKYAIQPEGAEITYLAGLYRFEEHRGVQVPMFAVITRESVEPVSSIHDRMPLILGKDSLSEWIHPNGDPNKIAKTALTKMVMEKAIDYPEPEPSFMPKKKRKV

SEQ ID NO: 484 - protein, 321 aa, Artificial Sequence
  WYL Ruminococcus flavefaciens strain XPD3002 + C-term NLS
MELFNEYRNKSLRAFLKLAERISYGEELSIDEFEAEYYRLSGDNKKITSVFYKNTLYNDKLPIFDTREGKVRLFGEPDKCSNKHISDTLLKSEITWLHNALNDKLSKLFLSDEERISIDAKLSDYTEYYKNIDDMWRSNEDISEEVEKNFKIILKAINEKQALSYTFKNKNCEGFPVRIEYDERTCRIYMIIYDGNRFVKSDISKLSDIYITENSIDTIPEIKDDMLNKKAYLPVVFTVTDDKNRKAIDRALLAFSVYDHVVEPIDEKTARFTIQYYTMDLDLLIKDILAFGSDIKVESPRYVVKRITDILRKVPKKKRKV

SEQ ID NO: 485 - protein, 419 aa, Artificial Sequence
  RtcB Eubacterium siraeum + C-term NLS
MIVLEIIGERNTAVVYGEIIDECAVSQIEEICNHPAFENSRIRIMPDCHAGKGCVIGFTCVTSNRMIVPNIVGVDIGCGILTTVFTADREIDYRALDTFIRSNIPSGMEIHDSVSDTVAENTALIAKVNGICDAIGESADVDYHLRSIGTLGGGNHFIEIDRLNNGNYALTVHTGSRNLGKRICGYFQSNASVIDTELRRSILLRHRSATTSEEHEEIDRRAAQIAPVSKELAFITGERYDSYIGCMLDAKALAAFNRTVISDRIMSFLADEYGVEIKDRFDTVHNYIDWYDDTHTSVVIRKGAISARKGERIVIPLNMRDGIIIAHGRGNEEWNCSAPHGSGRAYSRSDARRTFTLEEYVEEMDGVNTWSVSESTIDECPMAYKPSEMIIGSIGDTVEIESIAHTVYNFKAPKKKRKV

SEQ ID NO: 486 - protein, 10 aa, Homo sapiens
YASVAFYIFT

SEQ ID NO: 487 - protein, 499 aa, Homo sapiens
MSLADELLADLEEAAEEEEGGSYGEEEEEPAIEDVQEETQLDLSGDSVKTIAKLWDSKMFAEIMMKIEEYISKQAKASEVMGPVEAAPEYRVIVDANNLTVEIENELNIIHKFIRDKYSKRFPELESLVPNALDYIRTVKELGNSLDKCKNNENLQQILTNATIMVVSVTASTTQGQQLSEEELERLEEACDMALELNASKHRIYEYVESRMSFIAPNLSIIIGASTAAKIMGVAGGLTNLSKMPACNIMLLGAQRKTLSGFSSTSVLPHTGYIYHSDIVQSLPPDLRRKAARLVAAKCTLAARVDSFHESTEGKVGYELKDEIERKFDKWQEPPPVKQVKPLPAPLDGQRKKRGGRRYRKMKERLGLTEIRKQANRMSFGEIEEDAYQEDLGFSLGHLGKSGSGRVRQTQVNEATKARISKTLQRTLQKQSVVYGGKSTIRDRSSGTASSVAFTPLQGLEIVNPQAAEKKVAEANQKYFSSMAEFLKVKGEKSGLMST

SEQ ID NO: 488 - protein, 593 aa, Homo sapiens
MWTLVSWVALTAGLVAGTRCPDGQFCPVACCLDPGGASYSCCRPLLDKWPTTLSRHLGGPCQVDAHCSAGHSCIFTVSGTSSCCPFPEAVACGDGHHCCPRGFHCSADGRSCFQRSGNNSVGAIQCPDSQFECPDFSTCCVMVDGSWGCCPMPQASCCEDRVHCCPHGAFCDLVHTRCITPTGTHPLAKKLPAQRTNRAVALSSSVMCPDARSRCPDGSTCCELPSGKYGCCPMPNATCCSDHLHCCPQDTVCDLIQSKCLSKENATTDLLTKLPAHTVGDVKCDMEVSCPDGYTCCRLQSGAWGCCPFTQAVCCEDHIHCCPAGFTCDTQKGTCEQGPHQVPWMEKAPAHLSLPDPQALKRDVPCDNVSSCPSSDTCCQLTSGEWGCCPIPEAVCCSDHQHCCPQGYTCVAEGQCQRGSEIVAGLEKMPARRASLSHPRDIGCDQHTSCPVGQTCCPSLGGSWACCQLPHAVCCEDRQHCCPAGYTCNVKARSCEKEVVSAQPATFLARSPHVGVKDVECGEGHFCHDNQTCCRDNRQGWACCPYRQGVCCADRRHCCPAGFRCAARGTKCLRREAPRWDAPLRDPALRQLL

SEQ ID NO: 489 - DNA, 1833 bp, Homo sapiens
tcttgacaatgtccttttaattgtactcttttcaaaaaatctcctttctcagttaaaaaagacaaggcatgatgaagacctgctctagcccatactgggcggtgatctcggtcctgggggaggccaggccggactcttccaaggcctcctccctgggcagtcccagcaatggggccagtggcagggcaggttctccctgccagaacccgatcctagcccttcagaaggactggacctctgtgtcccttcagtgggaagccaccttggacacacgcagtcattcaggtggacataaggccactcttctcgcccttgaccttgaggaactcagccatgctggagaaatacttctggttggcctcagccaccttcttctctgccgcctgtgggttcacaatctccaggccctggagtggggtgaaggccacgctggaggccgtgcccgaggagcggtcgcggatggtggacttcccgccatatacgacgctctgcttctgcagggtccgctgcagcgtcttggagatcctggccttggtggcctcgtttacctgtgtctgccgcacacgcccactgcccgacttgcccaggtggcccaggctgaatcccaggtcctcctggtaggcgtcctcctcgatctctccgaagctcatacggttggcctgcttccggatctccgtcagccccagccgctccttcatcttgcggtacctgcggccgcctcgcttcttccgctgtccatccaggggcgcaggcagcggcttcacctgcttcacaggcggcggctcctgccacttgtcgaatttgcgctcgatctcatccttcagttcgtagcccaccttcccttctgtgctctcgtggaaactgtccacacgggctgccagtgtgcacttggcggccaccagccgggccgctttccgccgcagatccggtggcagggactgcacgatgtcactgtggtagatgtagccggtgtggggcagcactgaggtagacgagaagcccgacagcgtcttgcgctgggccccgagcagcatgatgttgcaggcgggcatcttggagaggttggtcaggccgccggccacacccatgatcttggcggccgtggatgccccgataatgatggacaggttgggtgcgatgaaggacatccgggactccacatactcgtagatgcggtgcttggaggcgttcagctccagcgccatgtcgcaggcctcctccagccgctccagctcctcctccgacagctgctgcccctgggtggtggaggcggtgacgctgacgaccatgatggtggcattggtgaggatctgctgcaggttctcattgttcttgcacttgtccaggctgttgcccagctccttgaccgtgcggatgtaatccagtgcattggggaccaaggactccagttcagggaatctctttgagtacttatcccggatgaacttatggatgatgttcagctcgttttcgatctccacggtcaggttgttggcatccacgatgacgcggtattcaggcgcggcctccactggtcccatcacttctgaagctttggcttgcttgctgatatactcctcaatcttcatcataatctcagcaaacatcttactatcccatagcttggcgatggtcttgactgaatccccggaaagatccagctgtgtctcctcctgcacatcctcgatcgctggctcctcttcttcctccccatagcttcctccttcctcctcttctgctgcctcttcgagatcagctaagagctcatctgccagagacatcccgaggcctctcctctccgcgcaccactgtttctagcgttagtcgctcacc

SEQ ID NO: 490 - DNA, 2130 bp, Homo sapiens
ttaagaaagtgtacaaactttattgaaacgcacacgcgcacacacacaaacacccctgtggatagggaaaagcacctggccacagggtccactgaaacggggaggggatggcagcttgtaatgtggcttttgccacaacccccttctgacagggaaggccttagattgaggccccacctcccatggtgatggggagctcagaatggggtccagggagaatttggttagggggaggtgctagggaggcctgagcagagggcaccctccgagtggggtcccgagggctgcagagtcttcagtactgtccctcacagcagctgtctcaaggctgggtccctcaaaggggcgtcccagcgcggggcctccctgcgcaaacacttggtacccctggctgcgcagcggaagccagcaggacagcagtggcgccgatcagcacaacagacgccctggcggtagggacagcaggcccagccctgtcggttgtctcggcagcaggtctggttatcatggcagaagtgtccttccccacactccacgtccttcacacccacgtgagggctacgggccaggaaggtggcaggctgggcagagaccacttccttctcgcaggatcgagccttcacgttgcaggtgtagccagccgggcagcagtgctggcgatcctcgcagcacacagcatggggcaactggcagcaggcccagctcccacccaggctcgggcagcaggtctgccccaccgggcagctggtgtgctggtcacagccgatgtctctggggtgggataaggaagcccggcgggcaggcatcttctccagtccagccacgatctcgcttcctcgctgacactgcccctcagctacacacgtgtagccctgggggcagcagtgctggtggtccgagcagcagacagcctctgggattggacagcagccccactccccagacgtgagttggcagcaggtatcggaggagggacagctgctgacattatcacaggggacatctctcttcaaggcttgtgggtctggcaggctgaggtgagctggggccttctccatccagggcacctggtggggcccctgttcacaggtacccttctgcgtgtcacacgtaaaccccgcgggacagcagtgtatgtggtcctcacagcacacagcctgggtaaaagggcagcagccccaggcccccgactgtagacggcagcaggtatagccatctgggcagctcacctccatgtcacatttcacatcccccactgtgtgcgcaggcagcttagtgaggaggtccgtggtagcgttctccttggagaggcacttactctggatcaggtcacacacagtgtcttgggggcagcagtgcaggtgatcggagcagcaggtggcgttgggcattgggcagcagccatacttcccactgggcagctcacagcaggtagaaccatcagggcaccgggaccgtgcgtccggacacatgaccgagctggacaaggccactgccctgttagtcctctgggcagggagcttctttgccagggggtgggtgcccgtgggtgtgatgcagcgggtgtgaaccaggtcgcagaaggcaccgtgcggacagcagtgcaccctgtcttcacagcaggaagcctggggcatggggcagcacccccaggagccatcgaccataacacagcacgtggagaagtccgggcattcgaactgactatcagggcactggatggcacccacggagttgttacctgatctttggaagcaggatcgcccgtctgcactgcagtggaagccccgtgggcagcagtgatggccatccccgcatgccacggcctctgggaaggggcagcaactggaagtccctgagacggtaaagatgcaggagtggccggcagagcagtgggcatcaacctggcaggggccacccagatgcctgctcagtgttgtgggccatttgtccagaaggggacggcagcagctgtagctggctcctccggggtccaggcagcaggccacagggcagaactgaccatctgggcaccgcgttccagccaccagccctgctgttaaggccacccagctcaccagggtccacatggtctgcctgcgtccgactccgcggtccttgggcagcagc

SEQ ID NO: 491 - protein, 349 aa, Homo sapiens
GRSRLLEDFRNNRYPNLQLREIAGHIMEFSQDQHGSRFIELKLERATPAERQLVFNEILQAAYQLMVDVFGNYVIQKFFEFGSLEQKLALAERIRGHVLSLALQMYGSRVIEKALEFIPSDQQNEMVRELDGHVLKCVKDQNGNYVVQKCIECVQPQSLQFIIDAFKGQVFALSTHPYGSRVIERILEHCLPDQTLPILEELHQHTEQLVQDQYGSYVIEHVLEHGRPEDKSKIVAEIRGNVLVLSQHKFASNVVEKCVTHASRTERAVLIDEVCTMNDGPHSALYTMMKDQYASYVVRKMIDVAEPGQRKIVMHKIRPHIATLRKYTYGKHILAKLEKYYMKNGVDLG

SEQ ID NO: 492 - DNA, 1047 bp, Homo sapiens
ggaagatctagactgctggaggactttagaaacaacagataccccaatctgcagctgagggaaatcgctggccacatcatggaattctcccaagaccagcacggcagcagattcatcgagctgaagctcgagagagccacccccgctgagaggcagctggtcttcaacgagattctgcaagccgcctaccaactgatggtggacgtgttcggcaactatgtgatccagaagttcttcgagttcggctctctggagcagaaactcgctctggccgagaggattagaggccatgtgctgtctctggccctccagatgtatggctctagagtcatcgaaaaggctctggagttcattccctccgaccagcagaacgagatggtgagggagctggatggacacgtgctgaagtgcgtgaaggaccagaacggcaattatgtggtgcagaagtgcatcgagtgcgtgcagcctcagtctctgcagttcattatcgacgccttcaagggccaagtgttcgctctgagcacacacccctatggaagcagagtgatcgagaggattctggaacactgtctgcccgaccagacactgcctattctggaggagctgcaccaacacacagagcagctggtgcaagaccaatatggcagctacgtgatcgaacacgtgctggagcatggcagacccgaggacaagagcaagatcgtggccgaaatcagaggcaatgtgctggtgctcagccaacacaagttcgcctccaacgtggtggaaaagtgcgtgacacacgcttctagaacagaaagggctgtgctcatcgatgaggtgtgcaccatgaacgacggcccccactccgctctgtacaccatgatgaaggaccagtacgcctcctatgtggtgaggaagatgatcgacgtggctgagcccggccagaggaaaatcgtgatgcacaagattagacctcacatcgccaccctcagaaagtacacctatggcaaacacattctggccaagctggagaagtactatatgaagaacggcgtcgacctcggc

SEQ ID NO: 493 - protein, 349 aa, Homo sapiens
GRSRLLEDFRNNRYPNLQLREIAGHIMEFSQDQHGSRFIRLKLERATPAERQLVFNEILQAAYQLMVDVFGNYVIQKFFEFGSLEQKLALAERIRGHVLSLALQMYGSRVIRKALEFIPSDQQNEMVRELDGHVLKCVKDQNGNYVVQKCIECVQPQSLQFIIDAFKGQVFALSTHPYGNRVIQRILEHCLPDQTLPILEELHQHTEQLVQDQYGSYVIEHVLEHGRPEDKSKIVAEIRGNVLVLSQHKFACNVVQKCVTHASRTERAVLIDEVCTMNDGPHSALYTMMKDQYASYVVRKMIDVAEPGQRKIVMHKIRPHIATLRKYTYGKHILAKLEKYYMKNGVDLG

SEQ ID NO: 494 - DNA, 1047 bp, Homo sapiens
ggaagatctagactgctggaggattttaggaataatagatatcccaatctgcagctgagggaaatcgctggccacatcatggagttcagccaagaccagcatggctctagattcattaggctgaagctggaaagagccacccccgccgagaggcaactggtgttcaatgagattctgcaagccgcctaccaactgatggtggacgtgttcggaaactacgtgatccagaaattcttcgagttcggctctctggaacagaagctcgccctcgccgagagaattagaggccacgtgctgtccctcgccctccagatgtatggctctagagtcattagaaaggctctggagttcattccctccgaccagcagaacgagatggtgagagaactggacggacacgtgctgaaatgcgtgaaggaccagaatggcaactatgtggtgcagaaatgcatcgaatgtgtccagcctcaatctctgcagttcatcattgacgccttcaagggccaagtgttcgctctgagcacccatccttatggcaatagagtgatccaaaggattctcgagcactgtctgcccgatcagacactgcctattctggaggagctgcaccagcataccgagcagctggtgcaagaccagtacggaagctacgtgatcgaacacgtgctggagcatggcagacccgaggacaagagcaagatcgtggctgagattaggggcaacgtgctggtgctgagccagcacaagttcgcttgcaacgtggtccagaagtgcgtcacacacgccagcagaacagaaagggccgtgctgattgatgaggtctgcaccatgaacgacggcccccactccgctctgtacaccatgatgaaggaccagtacgcctcctacgtcgtgaggaagatgatcgacgtggctgaacccggccagaggaaaatcgtgatgcacaagattagaccccacatcgccacactgagaaagtacacctacggcaaacacattctggccaagctggagaagtactacatgaagaacggcgtcgacctcggc

SEQ ID NO: 495 - protein, 349 aa, Homo sapiens
GRSRLLEDFRNNRYPNLQLREIAGHIMEFSQDQHGNRFIQLKLERATPAERQLVFNEILQAAYQLMVDVFGNYVIQKFFEFGSLEQKLALAERIRGHVLSLALQMYGSRVIRKALEFIPSDQQNEMVRELDGHVLKCVKDQNGSYVVEKCIECVQPQSLQFIIDAFKGQVFALSTHPYGSRVIERILEHCLPDQTLPILEELHQHTEQLVQDQYGSYVIEHVLEHGRPEDKSKIVAEIRGNVLVLSQHKFANNVVQKCVTHASRTERAVLIDEVCTMNDGPHSALYTMMKDQYASYVVRKMIDVAEPGQRKIVMHKIRPHIATLRKYTYGKHILAKLEKYYMKNGVDLG

SEQ ID NO: 496 - DNA, 1047 bp, Homo sapiens
ggaaggagcagactcctcgaggactttagaaacaataggtaccccaatctgcagctgagagaaatcgccggccatattatggagttcagccaagaccagcacggcaacagattcatccagctgaaactggagagggctacacccgccgagagacagctggtcttcaacgagattctgcaagccgcttaccaactgatggtggacgtcttcggcaattacgtcatccagaagttctttgagttcggctctctggagcagaaactggctctggccgagagaatcagaggccacgtgctgagcctcgctctgcagatgtacggctctagagtcattagaaaggctctggagttcatccccagcgaccagcagaatgagatggtgagagagctcgacggacatgtgctgaagtgtgtgaaggaccagaacggatcctacgtcgtcgagaagtgtatcgagtgcgtgcagccccagtctctgcagtttatcatcgacgccttcaaaggccaagtgttcgctctctccacccacccctacggcagcagagtcattgagaggattctggagcactgcctccccgaccagaccctccctattctggaagagctgcaccaacacacagagcagctggtccaagaccagtacggcagctacgtgattgagcatgtgctggagcatggcagacccgaggacaagagcaagatcgtggccgaaatcagaggaaacgtcctcgtgctgagccagcacaagttcgctaacaatgtggtgcagaagtgcgtcacccatgccagcagaacagagagagccgtgctgatcgacgaggtgtgcaccatgaacgacggcccccactccgctctgtacaccatgatgaaggaccagtacgcctcctatgtggtgaggaagatgatcgacgtggccgagcccggccagaggaaaatcgtgatgcacaagattagaccccacatcgccaccctcagaaagtacacctacggcaagcacattctggctaagctggaaaagtactacatgaaaaatggcgtcgatctgggc

SEQ ID NO: 497 - protein, 349 aa, Homo sapiens
GRSRLLEDFRNNRYPNLQLREIAGHIMEFSQDQHGSRFIRLKLERATPAERQLVFNEILQAAYQLMVDVFGSYVIEKFFEFGSLEQKLALAERIRGHVLSLALQMYGCRVIQKALEFIPSDQQNEMVRELDGHVLKCVKDQNGNYVVQKCIECVQPQSLQFIIDAFKGQVFALSTHPYGSRVIRRILEHCLPDQTLPILEELHQHTEQLVQDQYGSYVIRHVLEHGRPEDKSKIVAEIRGNVLVLSQHKFACNVVQKCVTHASRTERAVLIDEVCTMNDGPHSALYTMMKDQYACYVVQKMIDVAEPGQRKIVMHKIRPHIATLRKYTYGKHILAKLEKYYMKNGVDLG

SEQ ID NO: 498 - DNA, 1047 bp, Homo sapiens
ggaagatccagactgctggaggactttagaaacaatagataccccaatctgcagctgagggaaatcgccggccacattatggagtttagccaagaccagcatggctctagattcattaggctcaaactcgagagagccacccccgccgagaggcaactggtgttcaatgagattctgcaagccgcctaccaactcatggtcgacgtcttcggcagctacgtgatcgaaaagttcttcgagttcggctctctggaacagaaactcgctctggccgagaggattagaggccacgtgctgtccctcgctctgcagatgtacggatgcagagtgatccagaaggccctcgagttcatcccctccgaccaacagaatgagatggtgagagagctcgacggacacgtgctgaagtgtgtgaaggaccagaacggcaattacgtcgtccagaagtgcatcgagtgcgtgcagccccaatctctgcagttcatcattgacgccttcaaaggccaagtgttcgctctgagcacccatccttatggctctagagtgattagaagaattctcgagcactgtctgcccgatcagacactgcctattctggaggagctgcaccagcataccgaacagctggtgcaagaccagtacggctcctatgtgattaggcacgtgctggagcatggcagacccgaggacaagagcaagatcgtcgccgaaatcagaggcaatgtgctggtgctgagccaacacaagttcgcttgcaacgtcgtgcagaagtgcgtgacacacgcttctagaacagaaagggccgtgctgatcgacgaggtgtgcaccatgaatgacggcccccacagcgctctgtataccatgatgaaggaccaatacgcttgctacgtggtgcagaagatgattgatgtcgccgagcccggccagagaaaaatcgtgatgcacaagattagaccccacatcgccacactgaggaagtacacctacggaaagcacattctcgccaagctcgagaagtactacatgaagaacggcgtggatctgggc

SEQ ID NO: 499 - protein, 349 aa, Homo sapiens
GRSRLLEDFRNNRYPNLQLREIAGHIMEFSQDQHGSRFIELKLERATPAERQLVFNEILQAAYQLMVDVFGNYVIQKFFEFGSLEQKLALAERIRGHVLSLALQMYGSRVIRKALEFIPSDQQNEMVRELDGHVLKCVKDQNGSYVVRKCIECVQPQSLQFIIDAFKGQVFALSTHPYGNRVIQRILEHCLPDQTLPILEELHQHTEQLVQDQYGSYVIEHVLEHGRPEDKSKIVAEIRGNVLVLSQHKFASNVVEKCVTHASRTERAVLIDEVCTMNDGPHSALYTMMKDQYANYVVQKMIDVAEPGQRKIVMHKIRPHIATLRKYTYGKHILAKLEKYYMKNGVDLG

SEQ ID NO: 500 - DNA, 1047 bp, Homo sapiens
ggaaggagcagactcctcgaggactttagaaacaataggtaccccaatctgcagctgagagaaatcgccggccatattatggagttttcccaagaccagcacggctctagattcattgaactcaaactggagagagccacccccgctgagaggcagctggtgttcaatgagattctgcaagccgcctaccaactcatggtcgacgtcttcggaaactacgtgatccaaaagttcttcgagttcggctctctggagcagaaactcgctctggccgagaggatcagaggccacgtgctgtctctggctctgcagatgtacggaagcagagtgattagaaaagctctggagttcatcccctccgaccaacagaatgagatggtgagagagctcgacggacatgtgctgaagtgtgtgaaggaccagaacggatcctacgtggtgaggaagtgcatcgaatgcgtgcagccccagagcctccagttcattatcgacgccttcaagggccaagtgttcgctctctccacccatccttacggcaacagagtgattcagaggattctggagcattgcctccccgaccagaccctccctattctggaggagctgcaccagcataccgagcaactggtgcaagaccagtacggcagctacgtgattgagcatgtgctggagcatggcagacccgaggacaagagcaagatcgtggctgagattagaggcaatgtgctggtgctgagccagcacaagttcgccagcaatgtggtggagaaatgcgtgacacacgcctctagaacagagagagctgtgctgattgacgaggtctgcaccatgaacgacggcccccacagcgctctgtacaccatgatgaaagaccagtacgccaactacgtggtgcagaagatgatcgacgtcgctgagcccggccagaggaagatcgtgatgcacaagatcagaccccacatcgccaccctcagaaagtacacctatggcaagcacattctggccaagctcgagaagtactacatgaaaaatggagtcgatctgggc

SEQ ID NO: 501 - protein, 349 aa, Homo sapiens
GRSRLLEDFRNNRYPNLQLREIAGHIMEFSQDQHGSRFIQLKLERATPAERQLVFNEILQAAYQLMVDVFGSYVIEKFFEFGSLEQKLALAERIRGHVLSLALQMYGSRVIEKALEFIPSDQQNEMVRELDGHVLKCVKDQNGSYVVEKCIECVQPQSLQFIIDAFKGQVFALSTHPYGSRVIERILEHCLPDQTLPILEELHQHTEQLVQDQYGSYVIRHVLEHGRPEDKSKIVAEIRGNVLVLSQHKFANNVVQKCVTHASRTERAVLIDEVCTMNDGPHSALYTMMKDQYANYVVQKMIDVAEPGQRKIVMHKIRPHIATLRKYTYGKHILAKLEKYYMKNGVDLG

SEQ ID NO: 502 - DNA, 1047 bp, Homo sapiens
ggaagatccagactgctggaggactttagaaacaacagataccccaacctccagctgagagaaatcgccggccatatcatggaattctcccaagaccagcacggcagcagattcatccagctgaagctggagagggctacacccgccgaaaggcagctcgtcttcaatgagattctgcaagccgcctatcagctgatggtggatgtgttcggcagctatgtgatcgagaaattctttgaattcggctctctggaacagaagctcgccctcgccgaaagaattagaggccacgtgctgtccctcgctctgcaaatgtacggctctagagtcatcgagaaagccctcgagttcatccccagcgaccagcagaatgaaatggtgagagagctcgacggacatgtgctgaagtgtgtgaaggaccagaacggatcctacgtcgtcgagaagtgcatcgaatgcgtgcagccccagagcctccagtttatcatcgacgccttcaagggccaagtgtttgctctgagcacacacccttacggaagcagagtgatcgagaggattctggaacactgtctgcccgaccagacactgcctattctggaggagctgcaccagcacacagagcagctggtgcaagaccaatatggcagctacgtgattagacacgtcctcgaacacggcagacccgaggacaagagcaagattgtcgccgagatcagaggcaatgtgctggtgctgagccaacacaagttcgccaacaacgtcgtgcagaagtgtgtgacacacgccagcagaaccgagagggccgtcctcatcgacgaagtctgcaccatgaacgacggccctcactccgccctctacaccatgatgaaggaccagtacgccaactacgtggtgcagaagatgatcgacgtcgctgagcccggccagaggaagatcgtgatgcacaagatcagacctcatatcgccaccctcagaaagtacacctacggcaagcacattctggccaagctcgagaagtactacatgaaaaacggagtggatctgggc

SEQ ID NO: 503 - protein, 349 aa, Homo sapiens
GRSRLLEDFRNNRYPNLQLREIAGHIMEFSQDQHGSRFIQLKLERATPAERQLVFNEILQAAYQLMVDVFGSYVIRKFFEFGSLEQKLALAERIRGHVLSLALQMYGNRVIQKALEFIPSDQQNEMVRELDGHVLKCVKDQNGCYVVQKCIECVQPQSLQFIIDAFKGQVFALSTHPYGSRVIRRILEHCLPDQTLPILEELHQHTEQLVQDQYGSYVIRHVLEHGRPEDKSKIVAEIRGNVLVLSQHKFASNVVEKCVTHASRTERAVLIDEVCTMNDGPHSALYTMMKDQYANYVVQKMIDVAEPGQRKIVMHKIRPHIATLRKYTYGKHILAKLEKYYMKNGVDLG

SEQ ID NO: 504 - DNA, 1047 bp, Homo sapiens
ggcagatctagactgctggaggactttagaaacaatagataccccaatctgcaactgagagagatcgccggccacatcatggagttcagccaagaccagcacggctctagattcatccaactcaagctcgagagagccacccccgccgaaaggcagctggtgttcaatgagattctgcaagccgcctaccagctcatggtcgacgtcttcggaagctacgtgattagaaagttcttcgagttcggctctctggaacaaaaactggctctggctgagaggatcagaggccacgtgctgtccctcgccctccagatgtacggcaatagagtgatccagaaggctctggagttcatcccctccgaccaacagaatgagatggtgagagagctcgacggacatgtgctgaagtgtgtgaaggaccagaacggatgttacgtcgtccagaagtgcattgagtgcgtgcagcctcagtctctgcagtttatcatcgacgccttcaagggccaagtgtttgctctgtccacccatccctatggctctagagtgattaggaggattctggaacattgtctgcccgaccagacactgcctattctggaggagctgcaccagcacaccgagcaactcgtccaagaccagtacggcagctacgtgattagacacgtgctggagcatggcagacccgaggacaagagcaagatcgtggccgaaatcagaggcaatgtgctcgtgctgagccagcacaagttcgcttccaacgtggtggaaaagtgcgtgacacacgcctctagaaccgaaagggccgtgctgatcgatgaggtgtgcaccatgaacgatggaccccacagcgctctgtataccatgatgaaggaccagtacgccaactacgtggtgcagaagatgattgatgtcgccgagcccggccagagaaaaatcgtgatgcacaagatcagaccccacatcgccacactgagaaagtacacctatggaaagcacatcctcgccaagctcgagaagtactacatgaagaacggagtggatctgggc

SEQ ID NO: 505 - protein, 349 aa, Homo sapiens
GRSRLLEDFRNNRYPNLQLREIAGHIMEFSQDQHGSRFIRLKLERATPAERQLVFNEILQAAYQLMVDVFGSYVIRKFFEFGSLEQKLALAERIRGHVLSLALQMYGNRVIQKALEFIPSDQQNEMVRELDGHVLKCVKDQNGSYVVEKCIECVQPQSLQFIIDAFKGQVFALSTHPYGSRVIERILEHCLPDQTLPILEELHQHTEQLVQDQYGNYVIQHVLEHGRPEDKSKIVAEIRGNVLVLSQHKFASNVVEKCVTHASRTERAVLIDEVCTMNDGPHSALYTMMKDQYASYVVRKMIDVAEPGQRKIVMHKIRPHIATLRKYTYGKHILAKLEKYYMKNGVDLG

SEQ ID NO: 506 - DNA, 1047 bp, Homo sapiens
ggcagatctagactgctcgaggactttagaaacaataggtaccccaatctgcagctgagagagatcgccggccacatcatggagttcagccaagaccagcacggatctagattcattaggctgaagctcgagagggctacacccgccgagaggcagctggtgttcaatgagattctgcaagccgcctaccaactcatggtcgacgtcttcggaagctacgtgattagaaagttcttcgagttcggctctctggagcagaaactggctctggccgaaaggatcagaggacatgtgctgtctctggctctgcaaatgtacggcaatagagtgatccagaaggctctggagttcatcccctccgatcagcagaacgagatggtgagggagctggacggacacgtgctgaagtgcgtcaaggaccagaacggcagctacgtggtggagaaatgcatcgagtgcgtgcagccccagtctctgcagtttatcatcgacgccttcaaaggccaagtgttcgctctcagcacacacccttacggcagcagagtgatcgagaggattctggaacactgtctgcccgaccagacactgcctattctggaggagctgcaccaacacacagagcagctggtgcaagaccaatacggcaactacgtgatccagcatgtgctggagcacggaagacccgaggacaaaagcaagatcgtcgccgaaatcagaggcaatgtgctggtgctgagccaacacaagttcgcctccaacgtcgtggaaaagtgcgtgacccacgcttctagaacagaaagggctgtgctcatcgatgaggtgtgcaccatgaacgacggcccccacagcgctctgtacaccatgatgaaggaccagtacgccagctatgtggtgagaaagatgatcgacgtggccgaacccggccagaggaagattgtgatgcacaagattagaccccacatcgccacactgagaaagtacacctacggcaagcacattctcgccaagctggaaaagtactacatgaagaatggcgtggatctggga

SEQ ID NO: 507 - protein, 349 aa, Homo sapiens
GRSRLLEDFRNNRYPNLQLREIAGHIMEFSQDQHGSRFIELKLERATPAERQLVFNEILQAAYQLMVDVFGSYVIEKFFEFGSLEQKLALAERIRGHVLSLALQMYGCRVIQKALEFIPSDQQNEMVRELDGHVLKCVKDQNGSYVVRKCIECVQPQSLQFIIDAFKGQVFALSTHPYGSRVIERILEHCLPDQTLPILEELHQHTEQLVQDQYGCYVIQHVLEHGRPEDKSKIVAEIRGNVLVLSQHKFASYVVRKCVTHASRTERAVLIDEVCTMNDGPHSALYTMMKDQYASYVVEKMIDVAEPGQRKIVMHKIRPHIATLRKYTYGKHILAKLEKYYMKNGVDLG

SEQ ID NO: 508 - DNA, 1047 bp, Homo sapiens
ggaaggtccagactgctggaggattttagaaataataggtaccccaacctccaactgagagagatcgccggccacatcatggagttcagccaagaccagcacggatctagattcatcgagctgaagctcgaaagggccacacccgccgaaaggcagctggtgttcaacgaaatcctccaagccgcctaccaactcatggtcgacgtcttcggaagctacgtgatcgaaaagttcttcgagttcggctctctggaacagaagctcgccctcgctgaaagaatcagaggccacgtgctgtctctggctctgcaaatgtacggctgtagggtcatccagaaggctctcgagtttatccctagcgaccaacagaacgagatggtgagggagctggatggacacgtgctgaaatgcgtcaaggaccagaacggctcctatgtggtgagaaagtgcatcgaatgcgtgcagccccagagcctccagttcattatcgacgccttcaaaggccaagtgttcgctctgtccacacatccttacggcagcagagtgatcgagaggattctggaacactgtctgcccgaccagacactgcctattctggaggagctgcaccagcataccgagcagctggtgcaagaccagtacggctgctacgtgattcagcatgtgctggagcatggcagacccgaggacaagagcaagatcgtcgccgaaatcagaggcaatgtgctggtgctcagccaacacaagttcgcttcctacgtcgtgaggaaatgcgtgacccacgcttctagaaccgagagagccgtcctcatcgatgaggtgtgcaccatgaacgatggccctcacagcgctctgtataccatgatgaaggaccaatacgccagctacgtggtggagaagatgatcgacgtggctgagcccggccagaggaagattgtgatgcacaagattagaccccacattgccacactgaggaagtatacctacggcaagcacatcctcgccaagctcgagaagtactacatgaagaacggcgtcgacctcggc

SEQ ID NO: 509 - protein, 349 aa, Homo sapiens
GRSRLLEDFRNNRYPNLQLREIAGHIMEFSQDQHGNRFIQLKLERATPAERQLVFNEILQAAYQLMVDVFGSYVIRKFFEFGSLEQKLALAERIRGHVLSLALQMYGSRVIRKALEFIPSDQQNEMVRELDGHVLKCVKDQNGNYVVQKCIECVQPQSLQFIIDAFKGQVFALSTHPYGNRVIQRILEHCLPDQTLPILEELHQHTEQLVQDQYGNYVIQHVLEHGRPEDKSKIVAEIRGNVLVLSQHKFASYVVRKCVTHASRTERAVLIDEVCTMNDGPHSALYTMMKDQYASYVVEKMIDVAEPGQRKIVMHKIRPHIATLRKYTYGKHILAKLEKYYMKNGVDLG

SEQ ID NO: 510 - DNA, 1047 bp, Homo sapiens
ggaaggtctagactgctggaggactttagaaataatagatatcccaacctccagctgagagaaattgccggccacatcatggagttcagccaagaccagcacggaaatagattcatccaactgaagctcgagagagccacccccgccgagaggcaactggtgttcaatgagattctgcaagccgcctaccagctcatggtcgacgtcttcggaagctacgtcattagaaagttcttcgagttcggaagcctcgagcagaaactggctctggccgagaggattagaggccatgtgctctctctggccctccagatgtatggctctagagtgatcagaaaggctctggagttcattccctccgaccagcagaacgagatggtgagagagctggacggccacgtgctgaaatgcgtgaaggaccagaatggcaactacgtggtccagaaatgcatcgaatgcgtgcaaccccagtctctgcagttcatcatcgacgccttcaaaggccaagtgttcgccctcagcacccacccttacggcaacagagtgatccagaggattctggaacactgtctgcccgaccagacactgcctattctggaggagctgcaccaacacacagagcagctggtgcaagaccaatacggcaattacgtgatccaacacgtgctcgagcatggcagacccgaggacaaaagcaagatcgtcgccgagatcagaggcaatgtgctggtgctcagccaacacaagttcgcttcctacgtggtgaggaagtgcgtgacacacgcttctagaacagaaagggccgtgctcatcgatgaggtgtgcaccatgaacgacggcccccactccgctctgtacaccatgatgaaggaccagtacgcctcctacgtcgtggagaagatgattgacgtggccgagcccggccagaggaagatcgtcatgcacaagatcagaccccacattgccacactgaggaagtacacatacggcaagcatattctggccaagctcgagaagtactacatgaagaacggagtggatctgggc

SEQ ID NO: 511 - protein, 349 aa, Homo sapiens
GRSRLLEDFRNNRYPNLQLREIAGHIMEFSQDQHGSRFIRLKLERATPAERQLVFNEILQAAYQLMVDVFGSYVIRKFFEFGSLEQKLALAERIRGHVLSLALQMYGSRVIRKALEFIPSDQQNEMVRELDGHVLKCVKDQNGNYVVQKCIECVQPQSLQFIIDAFKGQVFALSTHPYGSRVIERILEHCLPDQTLPILEELHQHTEQLVQDQYGSYVIEHVLEHGRPEDKSKIVAEIRGNVLVLSQHKFASYVVRKCVTHASRTERAVLIDEVCTMNDGPHSALYTMMKDQYANYVVQKMIDVAEPGQRKIVMHKIRPHIATLRKYTYGKHILAKLEKYYMKNGVDLG

SEQ ID NO: 512 - DNA, 1047 bp, Homo sapiens
ggaagatctagactgctggaggactttagaaacaataggtaccccaacctccagctgagggagatcgccggccacatcatggagttctcccaagaccagcatggctctagattcattaggctcaaactcgagagagccacccccgccgagaggcaactggtgttcaatgagattctgcaagccgcctaccaactcatggtcgacgtcttcggatcctacgtgattagaaagttcttcgagttcggatctctggaacagaagctcgctctggccgaaagaatcagaggccatgtgctgtctctggccctccagatgtatggctctagagtcattagaaaggctctggagttcatccccagcgatcagcagaacgagatggtgagagagctcgacggccacgtgctgaagtgcgtgaaggaccagaacggaaactacgtggtccagaagtgcatcgagtgcgtgcagcctcagtctctgcagttcatcattgacgcctttaaaggccaagtgttcgctctgtccacacatccctacggatctagagtgattgagaggattctggagcattgtctgcccgaccagaccctccccattctggaggagctgcaccagcataccgagcaactcgtccaagaccagtacggcagctacgtcatcgagcacgtgctggagcatggcagacccgaggacaagagcaagatcgtcgccgagatcagaggcaatgtgctggtgctcagccaacacaagttcgcttcctacgtcgtgaggaagtgcgtgacacacgcctctagaacagaaagggccgtgctcatcgatgaggtgtgcaccatgaacgatggccctcatagcgctctgtacaccatgatgaaggaccaatacgccaactatgtggtgcagaagatgatcgacgtcgctgagcccggccagaggaagatcgtgatgcacaagattagaccccacatcgccaccctcagaaagtacacctatggcaaacacattctggccaagctcgagaagtactacatgaagaacggagtggatctgggc

SEQ ID NO: 513 - protein, 349 aa, Homo sapiens
GRSRLLEDFRNNRYPNLQLREIAGHIMEFSQDQHGSRFIRLKLERATPAERQLVFNEILQAAYQLMVDVFGSYVIRKFFEFGSLEQKLALAERIRGHVLSLALQMYGSRVIEKALEFIPSDQQNEMVRELDGHVLKCVKDQNGSYVVRKCIECVQPQSLQFIIDAFKGQVFALSTHPYGSRVIRRILEHCLPDQTLPILEELHQHTEQLVQDQYGSYVIEHVLEHGRPEDKSKIVAEIRGNVLVLSQHKFASYVVRKCVTHASRTERAVLIDEVCTMNDGPHSALYTMMKDQYASYVVEKMIDVAEPGQRKIVMHKIRPHIATLRKYTYGKHILAKLEKYYMKNGVDLG

SEQ ID NO: 514 - DNA, 1047 bp, Homo sapiens
ggaagatccagactgctggaggactttagaaacaacagataccccaatctgcagctgagagagatcgccggccacatcatggagttcagccaagaccagcacggctctagatttattagactgaagctcgagagagctacacccgccgagaggcagctggtcttcaacgagattctgcaagccgcctatcaactgatggtggacgtgttcggctcctacgtgattagaaagttcttcgagttcggctctctggaacaaaaactggctctggctgagaggatcagaggacatgtgctgagcctcgctctgcagatgtacggatctagagtgatcgagaaggctctggagttcatcccctccgaccaacagaacgagatggtgagagagctcgacggccatgtgctgaagtgcgtgaaggaccagaacggatcctacgtcgtcagaaagtgcatcgagtgtgtccagcctcaatctctgcagttcatcattgacgccttcaaaggccaagtgttcgctctgagcacccatccttatggcagcagagtgattagaagaatcctcgagcattgtctgcccgaccagaccctccccattctggaggagctgcaccagcacaccgagcagctggtgcaagaccagtacggaagctacgtcatcgagcacgtgctggagcatggaagacccgaggacaagtccaagatcgtcgccgaaatcagaggcaatgtgctggtgctgagccagcacaagttcgcttcctacgtcgtgaggaagtgcgtgacacacgcttctagaacagagagggctgtgctcatcgatgaggtgtgcaccatgaacgatggccctcacagcgctctgtacaccatgatgaaagaccagtacgccagctacgtggtggagaaaatgatcgacgtggctgagcccggccagaggaagatcgtgatgcacaagattagaccccacattgccaccctcagaaagtacacctatggcaagcacattctggccaagctcgagaagtactacatgaagaacggcgtcgacctcggc

SEQ ID NO: 515 - protein, 349 aa, Homo sapiens
GRSRLLEDFRNNRYPNLQLREIAGHIMEFSQDQHGNRFIQLKLERATPAERQLVFNEILQAAYQLMVDVFGSYVIEKFFEFGSLEQKLALAERIRGHVLSLALQMYGNRVIQKALEFIPSDQQNEMVRELDGHVLKCVKDQNGSYVVRKCIECVQPQSLQFIIDAFKGQVFALSTHPYGSRVIRRILEHCLPDQTLPILEELHQHTEQLVQDQYGSYVIRHVLEHGRPEDKSKIVAEIRGNVLVLSQHKFACNVVQKCVTHASRTERAVLIDEVCTMNDGPHSALYTMMKDQYACYVVQKMIDVAEPGQRKIVMHKIRPHIATLRKYTYGKHILAKLEKYYMKNGVDLG

SEQ ID NO: 516 - DNA, 1047 bp, Homo sapiens
ggaagatctagactgctggaggactttagaaataacagataccccaatctgcagctcagagagatcgccggccacatcatggaattcagccaagaccagcacggcaacagattcatccagctcaagctggagagagctacccccgccgaaagacagctggtcttcaacgagattctgcaagccgcttaccaactcatggtcgacgtcttcggctcctacgtcatcgaaaagttcttcgaatttggctctctggagcagaaactggctctggccgagagaattagaggccacgtgctgagcctcgctctgcagatgtacggcaatagagtcatccaaaaggccctcgagttcatcccctccgaccaacagaatgagatggtgagagagctcgacggacatgtgctgaagtgtgtgaaggaccagaacggatcctacgtcgtcagaaagtgcattgagtgcgtccagcctcagtctctgcaattcatcatcgatgccttcaagggccaagtgtttgctctcagcacacatccctacggctctagagtgattagaaggattctggagcactgtctgcccgatcagacactgcctatcctcgaggagctgcaccaacacacagagcaactggtgcaagaccagtacggcagctacgtgatcagacacgtcctcgagcatggcagacccgaggacaaaagcaagatcgtggccgagatcagaggaaacgtgctcgtgctctcccagcacaagttcgcttgcaatgtggtccagaagtgcgtgacacacgcctctagaacagagagagctgtgctcatcgatgaggtgtgcaccatgaacgatggccctcatagcgctctgtacaccatgatgaaagaccagtacgcttgctacgtggtgcagaaaatgatcgacgtcgctgagcccggccagaggaagatcgtgatgcacaagatcagacctcatatcgccaccctcagaaagtacacctatggcaaacacattctggccaagctcgagaagtactacatgaagaacggagtggatctgggc

SEQ ID NO: 517 - protein, 349 aa, Homo sapiens
GRSRLLEDFRNNRYPNLQLREIAGHIMEFSQDQHGSRFIELKLERATPAERQLVFNEILQAAYQLMVDVFGSYVIEKFFEFGSLEQKLALAERIRGHVLSLALQMYGCRVIQKALEFIPSDQQNEMVRELDGHVLKCVKDQNGNYVVQKCIECVQPQSLQFIIDAFKGQVFALSTHPYGCRVIQRILEHCLPDQTLPILEELHQHTEQLVQDQYGNYVIQHVLEHGRPEDKSKIVAEIRGNVLVLSQHKFASYVVRKCVTHASRTERAVLIDEVCTMNDGPHSALYTMMKDQYACYVVQKMIDVAEPGQRKIVMHKIRPHIATLRKYTYGKHILAKLEKYYMKNGVDLG

SEQ ID NO: 518 - DNA, 1047 bp, Homo sapiens
ggcagaagcagactgctggaggactttagaaacaatagatatcccaacctccagctgagagagatcgctggccacatcatggagttctcccaagatcagcacggctctagattcatcgaactgaagctggagagagccacccccgctgagagacagctcgtgttcaacgagattctgcaagccgcctatcaactgatggtcgatgtcttcggcagctacgtgatcgagaagttcttcgagttcggcagcctcgagcagaagctggctctggccgaaaggatcagaggccatgtgctgtctctggccctccagatgtacggatgtagagtgatccagaaagccctcgagttcatcccctccgaccagcagaatgagatggtgagagagctcgacggacatgtgctgaagtgtgtgaaggaccagaacggaaactacgtcgtccagaagtgcatcgagtgcgtgcagccccagtctctgcagtttatcatcgacgccttcaagggccaagtgttcgctctgagcacccacccctacggctgtagagtgattcagaggattctggagcattgcctccccgaccagaccctccccattctggaggagctgcaccagcacacagagcaactggtgcaagaccagtacggcaactacgtgatccagcacgtgctggagcatggaagacccgaggacaagtccaagatcgtcgccgaaatcagaggcaatgtgctggtgctcagccagcacaagttcgcctcctacgtcgtgaggaagtgcgtgacacacgcttctagaacagaaagggccgtgctcatcgatgaggtgtgcaccatgaacgatggccctcacagcgctctgtacaccatgatgaaggaccagtacgcttgctacgtggtgcagaagatgatcgatgtcgccgagcccggccagagaaagatcgtgatgcacaagatcagaccccacatcgccacactgagaaagtatacctacggcaagcacattctggccaagctcgagaaatactacatgaagaatggcgtggatctcgga

SEQ ID NO: 519 - protein, 349 aa, Homo sapiens
GRSRLLEDFRNNRYPNLQLREIAGHIMEFSQDQHGSRFIELKLERATPAERQLVFNEILQAAYQLMVDVFGSYVIEKFFEFGSLEQKLALAERIRGHVLSLALQMYGCRVIQKALEFIPSDQQNEMVRELDGHVLKCVKDQNGNYVVQKCIECVQPQSLQFIIDAFKGQVFALSTHPYGCRVIQRILEHCLPDQTLPILEELHQHTEQLVQDQYGSYVIRHVLEHGRPEDKSKIVAEIRGNVLVLSQHKFACNVVQKCVTHASRTERAVLIDEVCTMNDGPHSALYTMMKDQYASYVVRKMIDVAEPGQRKIVMHKIRPHIATLRKYTYGKHILAKLEKYYMKNGVDLG

SEQ ID NO: 520 - DNA, 1047 bp, Homo sapiens
ggaaggtctagactgctggaggactttagaaacaatagataccccaacctccaactgagagagatcgccggccacatcatggagttctcccaagaccagcatggctccagattcatcgagctgaaactggagagagccacccccgctgaaaggcagctcgtgttcaacgagattctgcaagctgcctaccagctgatggtggatgtgttcggctcctacgtcatcgagaagttcttcgagtttggctctctggagcagaagctggctctcgctgagagaattagaggccatgtgctgtctctggccctccagatgtacggctgtagggtcatccaaaaggctctggagttcattccctccgaccagcagaacgagatggtgagggaactggatggacacgtgctgaaatgcgtgaaggaccagaatggcaactacgtcgtgcagaaatgtatcgagtgcgtgcagccccagtctctgcagtttatcatcgacgccttcaaaggccaagtgttcgccctcagcacacacccttacggatgcagagtgatccagaggattctggaacactgtctgcccgaccagacactgcctattctggaggagctgcaccaacacacagagcagctggtgcaagaccaatacggcagctatgtgatcagacacgtgctcgagcatggcagacccgaggacaaaagcaagatcgtcgccgagatcagaggaaacgtcctcgtgctgagccaacacaagttcgcttgcaacgtggtccagaaatgtgtgacccatgcttctagaaccgaaagggctgtgctcatcgatgaggtctgcaccatgaacgacggcccccactccgctctgtacaccatgatgaaggaccagtacgcctcctatgtggtgaggaagatgatcgacgtggccgagcccggccagagaaagatcgtcatgcacaagattagaccccacatcgccacactgaggaagtacacctacggcaagcacattctcgccaagctcgagaagtactacatgaagaacggcgtggatctgggc

SEQ ID NO: 521 - protein, 644 aa, Homo sapiens
GRSRLLEDFRNNRYPNLQLREIAGHIMEFSQDQHGSRFIELKLERATPAERQLVFNEILQAAYQLMVDVFGSYVIRKFFEFGSLEQKLALAERIRGHVLSLALQMYGSYVIRKALEFIPSDQQNEMVRELDGHVLKCVKDQNGCYVVQKCIECVQPQSLQFIIDAFKGQVFALSTHPYGSRVIRRILEHCLPDQTLPILEELHQHIMEFSQDQHGNRFIQLKLERATPAERQLVFNEILQAAYQLMVDVFGSYVIEKFFEFGSLEQKLALAERIRGHVLSLALQMYGSYVIRKALEFIPSDQQNEMVRELDGHVLKCVKDQNGCYVVQKCIECVQPQSLQFIIDAFKGQVFALSTHPYGNRVIQRILEHCLPDQTLPILEELHQHTEQLVQDQYGSYVIRHVLEHGRPEDKSKIVAEIRGNVLVLSQHKFANNVVQKCVTHASRTERAVLIDEVCTMNDGPHSALYTMMKDQYASYVVRKMIDVAEPGQRKIVMHKIRPHTEQLVQDQYGSYVIEHVLEHGRPEDKSKIVAEIRGNVLVLSQHKFASYVVRKCVTHASRTERAVLIDEVCTMNDGPHSALYTMMKDQYACYVVQKMIDVAEPGQRKIVMHKIRPHIATLRKYTYGKHILAKLEKYYMKNGVDLG

SEQ ID NO: 522 - DNA, 1932 bp, Homo sapiens
ggccggtcacggctcctcgaagacttccgcaataatcgttatcccaatttgcaactgcgagaaattgctggccatattatggagtttagtcaagatcaacacggcagcagattcatcgaactgaaactggagcgggcaacaccggccgagcgacagttagtattcaacgagatcctgcaagccgcatatcagctcatggtagatgtgtttggcagttacgtcatcagaaagttttttgaatttgggtctctggaacagaagcttgccctggccgagcgcatccgtgggcacgttctgagcttggctctacagatgtatgggagttatgtaataaggaaagcgctggaatttattccttctgaccagcaaaatgaaatggtgcgcgagctcgacggccacgtgctgaaatgtgtcaaggaccagaacggctgctatgtcgtccaaaagtgtatagagtgcgttcagccccagagccttcagttcattattgatgccttcaaagggcaggtcttcgccctttctacccatccatatggttcaagagtgattaggcgcattttagagcactgtctgcccgatcagaccctccctatccttgaggagctgcatcagcacatcatggagttttcacaggatcagcatggtaaccgattcatccagctgaagctggagcgggcaactccggctgagagacagctagtgttcaacgaaatattgcaggccgcctaccagctgatggtggacgtgttcggatcctatgtgattgaaaagttttttgagtttggctctcttgagcaaaaacttgcattagccgagcgtattcgggggcacgttctatctttggcgctgcagatgtatggctcctatgttattcgcaaagcgctggaattcatcccatccgaccagcagaatgaaatggtgcgcgagttagacggacacgtacttaagtgcgtgaaggaccagaacggttgctacgtggtccagaagtgtattgaatgtgtccaacctcagagtctccagttcatcatagatgcatttaagggtcaagtgttcgctctcagtacgcatccatacggcaatcgggtcatccagcgcatcttagagcactgcctgcctgaccagactctccctattctggaggaacttcatcaacatactgaacagttggtgcaggatcagtatggatcctacgtcatcagacatgtgctcgaacacgggagacccgaggacaagtcaaaaatcgttgccgagatccgagggaacgtgctggttttgagccaacacaagtttgctaataatgtggtacagaaatgcgttacccatgcgtccaggaccgaaagagccgtgctgatagacgaggtgtgtaccatgaacgatggacctcactccgcactctacacaatgatgaaagatcaatatgccagctacgtcgtcagaaagatgatcgacgtggcagagcccggtcagaggaagattgtgatgcataaaattcgaccccacacagagcagctggttcaggatcagtacggatcgtacgtcatagagcatgtactggaacacggtaggccagaggacaaatccaaaatcgtggccgaaataagaggaaacgtgttggttttgtcacagcataaattcgccagctacgtcgtgcggaaatgcgtgacacacgcaagcaggactgagcgggctgtactaattgacgaggtttgtaccatgaacgatggaccacactctgctctgtatacaatgatgaaagaccaatacgcttgctacgtcgtgcagaagatgattgatgtggccgaaccaggacaaaggaaaatcgttatgcacaagatcaggccccacatcgctactctgaggaagtacacgtacggcaagcatatcctcgccaagctcgaaaagtactacatgaagaacggcgtggacctgggg

SEQ ID NO: 523 - protein, 644 aa, Homo sapiens
GRSRLLEDFRNNRYPNLQLREIAGHIMEFSQDQHGSRFIELKLERATPAERQLVFNEILQAAYQLMVDVFGSYVIRKFFEFGSLEQKLALAERIRGHVLSLALQMYGSYVIRKALEFIPSDQQNEMVRELDGHVLKCVKDQNGCYVVQKCIECVQPQSLQFIIDAFKGQVFALSTHPYGSRVIRRILEHCLPDQTLPILEELHQHTEQLVQDQYGNYVIQHVLEHGRPEDKSKIVAEIRGHIMEFSQDQHGSRFIELKLERATPAERQLVFNEILQAAYQLMVDVFGSYVIRKFFEFGSLEQKLALAERIRGHVLSLALQMYGCRVIQKALEFIPSDQQNEMVRELDGHVLKCVKDQNGNHVVQKCIECVQPQSLQFIIDAFKGQVFALSTHPYGSRVIRRILEHCLPDQTLPILEELHQHTEQLVQDQYGNYVIQHVLEHGRPEDKSKIVAEIRGNVLVLSQHKFASYVVRKCVTHASRTERAVLIDEVCTMNDGPHSALYTMMKDQYASYVVEKMIDVAEPGQRKIVMHKIRPNVLVLSQHKFASYVVRKCVTHASRTERAVLIDEVCTMNDGPHSALYTMMKDQYACYVVQKMIDVAEPGQRKIVMHKIRPHIATLRKYTYGKHILAKLEKYYMKNGVDLG

SEQ ID NO: 524 - DNA, 1932 bp, Homo sapiens
ggccgaagccgcctgctggaagacttcaggaataatcgctatccaaaccttcaactgcgcgaaatcgcggggcatataatggagttctcccaggaccagcatggctcacgattcattgagcttaaacttgaaagagcaacgcctgcggaacgacagcttgtcttcaacgagattcttcaggctgcttaccaactcatggtggatgtctttgggtcatacgttataaggaagttctttgagtttgggtctctcgaacaaaagctggcactggcagaacggatcagagggcacgtactctccttggcccttcaaatgtacggctcctacgtaatacgaaaagcgctcgaatttattccttctgatcaacagaacgagatggtgcgagaactcgatggccatgtcttgaaatgtgttaaggaccaaaatggttgttacgttgtacaaaaatgcatagaatgtgttcaaccacaatctttgcagttcatcattgacgcgtttaagggacaggtcttcgctttgagcacgcatccctacggaagtagggtcataaggcgcatcttggagcattgtctgcccgatcaaacactccccatacttgaagagttgcatcaacacacagagcagcttgtgcaagatcagtatggcaattacgtcattcaacatgtattggagcacggcaggccggaagataagtccaagatagtcgcagaaattagaggccatatcatggagttctctcaagaccaacatggcagtaggttcattgaacttaagctcgagagagctactcccgcagagaggcagctcgtctttaatgagatcctgcaagcagcctatcaactgatggtcgacgtttttggtagctacgtaatacggaagttttttgaatttggatcacttgagcaaaaactggcgctggcagagagaatccgaggtcatgttctttcccttgctctccagatgtacggctgccgcgtgatacagaaggctcttgagttcataccttcagaccagcagaatgagatggtgagagaacttgacggacacgttttgaagtgtgttaaagaccagaacggaaatcacgtggtacaaaagtgtattgaatgcgtgcagccacagagtctgcaattcatcattgatgccttcaagggacaagtttttgcgctcagcacacatccctatggaagtcgagtcatcaggcgcattctcgaacattgcctcccggaccaaaccctcccgattctcgaagaactccatcaacacactgagcaacttgttcaagaccaatacggtaattatgtcatccaacacgtgcttgaacacgggcggccagaggacaaatctaagattgtagctgagattagaggcaacgtcctggtattgagtcagcacaagttcgcttcttacgttgttcgcaagtgcgtcacacacgcaagtcgcaccgagagagcggtcctcatcgatgaggtgtgtacgatgaacgacggaccacactctgcactttacaccatgatgaaggaccagtacgcaagctatgtcgttgaaaagatgatcgatgttgccgaacccggacagcgcaaaatcgtgatgcataaaatccggccgaatgtgttggtactctcccaacacaaatttgcgtcatacgtcgttcggaagtgtgtaacacacgcgtctcggacagagcgcgctgtacttattgatgaagtttgcacaatgaacgacggacctcactcagctctgtacacaatgatgaaagatcaatacgcctgttatgtcgtgcaaaaaatgattgacgttgctgagccggggcagaggaagatcgttatgcataaaatcagacctcacatcgcgacgctcagaaaatacacttatggcaaacacatactcgcaaaacttgaaaagtattacatgaaaaacggcgttgacctcggc

SEQ ID NO: 525 - protein, 644 aa, Homo sapiens
GRSRLLEDFRNNRYPNLQLREIAGHIMEFSQDQHGSRFIELKLERATPAERQLVFNEILQAAYQLMVDVFGSYVIRKFFEFGSLEQKLALAERIRGHVLSLALQMYGSYVIRKALEFIPSDQQNEMVRELDGHVLKCVKDQNGCYVVQKCIECVQPQSLQFIIDAFKGQVFALSTHPYGSRVIRRILEHCLPDQTLPILEELHQHTEQLVQDQYGNYVIQHVLEHGRPEDKSKIVAEIRGNVLVLSQHKFASNVVEKCVTHASRTERAVLIDEVCTMNDGPHSALYTMMKDQYASYVVRKMIDVAEPGQRKIVMHKIRPHIMEFSQDQHGSRFIQLKLERATPAERQLVFNEILQAAYQLMVDVFGNYVIQKFFEFGSLEQKLALAERIRGHVLSLALQMYGSYVIRKALEFIPSDQQNEMVRELDGHVLKCVKDQNGNYVVQKCIECVQPQSLQFIIDAFKGQVFALSTHPYGSRVIRRILEHCLPDQTLPILEELHQHTEQLVQDQYGSYVIEHVLEHGRPEDKSKIVAEIRGNVLVLSQHKFASYVVRKCVTHASRTERAVLIDEVCTMNDGPHSALYTMMKDQYACYVVQKMIDVAEPGQRKIVMHKIRPHIATLRKYTYGKHILAKLEKYYMKNGVDLG

SEQ ID NO: 526 - DNA, 1932 bp, Homo sapiens
ggcagatcaaggcttcttgaggattttagaaataatcgctacccaaacttgcaactgcgagaaattgcaggccatataatggaattctcacaggatcaacatggcagccgattcatcgaactgaaactcgaacgagcgacgcccgctgaaaggcagctggttttcaatgagattcttcaagctgcctaccagcttatggtcgatgtgtttggatcctatgtgataagaaagtttttcgaatttggatctctcgagcagaaactggcattggcagagcggatccggggtcacgtcctttcattggccctgcaaatgtatggaagctatgtgatccggaaggccctggagtttatcccatctgatcagcagaacgagatggtacgggaactggacggtcacgtcctgaaatgcgtaaaagaccaaaatggatgctacgtagtacagaagtgcattgagtgtgtccagcctcaatctttgcagtttataattgacgccttcaagggccaagtctttgcactgtccactcacccgtatggaagcagagttattagacgcatcctcgaacactgtttgccggaccagacacttcccatactggaagaacttcaccaacatactgaacagcttgtgcaggatcagtacggaaactatgtgatacagcacgtacttgagcatggtaggccagaagataaaagtaaaattgttgctgagataaggggtaacgtacttgtgctctcacaacataagttcgctagtaacgtggttgaaaagtgcgtaacccatgcttctagaaccgaaagggcagtacttatcgatgaagtttgtaccatgaatgatggtccccactccgcactctatactatgatgaaagaccaatacgcttcttatgtcgttcgaaaaatgatagacgtggcggaacccggacagcggaaaattgttatgcataagatacgaccgcacatcatggaattttcacaggaccaacacggctcaaggtttatacagctgaagctggaacgggcgacccctgctgagcgacagctcgtcttcaatgaaatattgcaagcggcctaccaattgatggtcgacgtgtttggaaattatgtcatacaaaaatttttcgagtttggatcattggaacaaaagctggccctcgccgaaagaattcgcggccacgttctctccttggcgctccaaatgtacggtagttatgtgatacgcaaggctttggaattcattccatcagaccagcagaatgaaatggttagagaattggatggccatgtgttgaagtgtgtgaaagatcagaacgggaattacgtcgtccaaaaatgcatagaatgtgttcagcctcaatcacttcagtttattatcgacgcttttaagggccaagtttttgctttgagcactcatccatacggctccagggtaattcggcgcatcctcgagcactgcctccctgaccaaacgctcccgattctcgaagagctgcatcagcatacagagcaactggtgcaagaccagtatggttcatacgttattgagcacgtactggaacacggcagaccggaggacaagtccaaaattgtagccgagattcgaggaaatgttcttgtgctcagtcaacataaattcgctagctatgtggtgcggaagtgcgtaacacacgcttcacgaacggaacgggcggtattgattgatgaagtgtgcacgatgaatgacggccctcattccgcgctttacacaatgatgaaggatcaatacgcatgttatgtagtgcagaaaatgatagatgtagcggaacctgggcaaaggaagatcgtcatgcacaaaatccgaccccatatcgcaactctccgcaaatacacatacggtaagcatatactcgcaaaacttgagaaatactatatgaagaacggtgttgacttggga

SEQ ID NO: 527 - protein, 644 aa, Homo sapiens
GRSRLLEDFRNNRYPNLQLREIAGHIMEFSQDQHGNRFIQLKLERATPAERQLVFNEILQAAYQLMVDVFGNYVIQKFFEFGSLEQKLALAERIRGHVLSLALQMYGSYVIRKALEFIPSDQQNEMVRELDGHVLKCVKDQNGSYVVRKCIECVQPQSLQFIIDAFKGQVFALSTHPYGNRVIQRILEHCLPDQTLPILEELHQHIMEFSQDQHGSRFIELKLERATPAERQLVFNEILQAAYQLMVDVFGSYVIEKFFEFGSLEQKLALAERIRGHVLSLALQMYGNRVIQKALEFIPSDQQNEMVRELDGHVLKCVKDQNGSHVVEKCIECVQPQSLQFIIDAFKGQVFALSTHPYGNRVIQRILEHCLPDQTLPILEELHQHTEQLVQDQYGSYVIRHVLEHGRPEDKSKIVAEIRGNVLVLSQHKFASYVVRKCVTHASRTERAVLIDEVCTMNDGPHSALYTMMKDQYASYVVRKMIDVAEPGQRKIVMHKIRPHTEQLVQDQYGSYVIEHVLEHGRPEDKSKIVAEIRGNVLVLSQHKFANNVVQKCVTHASRTERAVLIDEVCTMNDGPHSALYTMMKDQYANYVVQKMIDVAEPGQRKIVMHKIRPHIATLRKYTYGKHILAKLEKYYMKNGVDLG

SEQ ID NO: 528 - DNA, 1932 bp, Homo sapiens
ggtcggtcccggcttctggaagattttagaaataaccggtaccccaatcttcaacttcgggaaatcgctggacacatcatggaattttcccaggaccagcatggtaaccgcttcatccaactcaagctcgagagggccacacctgcggaacgccaattggtgttcaacgagattttacaggctgcttaccagctcatggttgacgtcttcggcaattatgtcatccaaaagttctttgaatttggctctctcgagcaaaaacttgcactagctgaaagaataagagggcatgtgctgtcactggcgttgcagatgtacggtagctacgtcattaggaaggccctcgaatttattccgagtgatcagcagaatgaaatggtacgggagttggatggacacgtgctgaagtgcgttaaggaccagaacggatcttatgtggtgcgcaagtgtattgagtgtgtgcagccccagagtctccagtttataattgacgcctttaaagggcaggtgttcgccctgtcgacgcatccttacggtaaccgcgtgatccagagaattctggaacactgcttgccagaccaaacactgcccatactggaggagctgcaccaacacattatggaatttagccaagatcagcacggttctcgtttcatcgaactgaagctggaacgcgctacccctgctgagagacagctggttttcaacgaaatcctgcaggctgcctatcaattaatggttgatgtgttcggcagctatgtcattgaaaaatttttcgagttcggctccctcgagcagaaattggctttggccgaacgtattagaggccatgtactgagcctggcccttcagatgtacggcaaccgcgtgatccagaaggcactcgagttcatcccgagcgaccagcaaaacgaaatggtccgtgagttagatgggcacgtgctgaaatgtgtgaaggaccagaatgggtctcatgtcgtcgagaagtgtatagagtgcgtccagccacagtcacttcagttcataatcgacgcctttaagggacaggttttcgcattatcaacccacccctatggtaatagggtgatacagaggattctagaacattgtctacccgatcagactcttcctatcctggaggagctgcatcaacatacagagcagctcgtgcaggaccagtacggctcttatgtgattcggcacgtacttgagcatgggcgcccagaagacaagagcaagatcgtcgcagagattagggggaatgtgctggtcctgtcccaacacaaattcgcctcctatgtggtgaggaagtgcgtaactcacgcttctaggaccgaacgagccgtactgatcgacgaggtttgcacaatgaacgatggacctcactcggcgctatacacgatgatgaaggatcaatatgcaagttacgtggtgcgaaagatgattgacgtggcagagccaggccagcggaaaatcgttatgcacaaaatacgaccccacaccgagcagttggttcaagatcagtacggctcatacgtgatcgaacatgttctggagcacgggagacccgaggataaaagtaaaatcgtggccgagatccggggaaatgtgctggttctctcccagcacaagtttgccaataacgtcgttcagaaatgcgtaacacatgcaagcagaaccgagagggccgtgttgatcgacgaggtctgtactatgaatgatggaccacattccgccctgtacactatgatgaaggatcagtacgcaaactacgtggtgcagaaaatgattgacgtagccgagccaggacagcgaaagattgtcatgcacaaaattcgacctcacatcgctactctcagaaaatatacctatggcaagcatatcttagcgaagctcgaaaaatattacatgaaaaacggcgtcgacctgggg

SEQ ID NO: 529 - protein, 644 aa, Homo sapiens
GRSRLLEDFRNNRYPNLQLREIAGHIMEFSQDQHGNRFIQLKLERATPAERQLVFNEILQAAYQLMVDVFGNYVIQKFFEFGSLEQKLALAERIRGHVLSLALQMYGSYVIRKALEFIPSDQQNEMVRELDGHVLKCVKDQNGSYVVRKCIECVQPQSLQFIIDAFKGQVFALSTHPYGNRVIQRILEHCLPDQTLPILEELHQHTEQLVQDQYGSYVIEHVLEHGRPEDKSKIVAEIRGHIMEFSQDQHGSRFIELKLERATPAERQLVFNEILQAAYQLMVDVFGNYVIQKFFEFGSLEQKLALAERIRGHVLSLALQMYGSRVIEKALEFIPSDQQNEMVRELDGHVLKCVKDQNGNHVVQKCIECVQPQSLQFIIDAFKGQVFALSTHPYGSRVIRRILEHCLPDQTLPILEELHQHTEQLVQDQYGSYVIRHVLEHGRPEDKSKIVAEIRGNVLVLSQHKFASYVVRKCVTHASRTERAVLIDEVCTMNDGPHSALYTMMKDQYASYVVEKMIDVAEPGQRKIVMHKIRPNVLVLSQHKFANNVVQKCVTHASRTERAVLIDEVCTMNDGPHSALYTMMKDQYANYVVQKMIDVAEPGQRKIVMHKIRPHIATLRKYTYGKHILAKLEKYYMKNGVDLG

SEQ ID NO: 530 - DNA, 1932 bp, Homo sapiens
ggacgctcaaggctgctggaagactttcgcaacaaccggtaccctaatctccagcttagagaaatcgcgggccatattatggagtttagtcaagaccagcacgggaatagattcattcaacttaagctcgaaagggctaccccggcagaaaggcaactcgtattcaacgaaatattgcaagcggcttaccaattgatggttgacgttttcggaaattacgtcatccaaaaattctttgagttcggaagtctggaacagaaattggccctcgcggagcgcatacgcggacatgttctgagcttggcgctccagatgtacgggagttatgttatccgaaaagctctggaatttattccttccgatcagcagaacgagatggtgagggaacttgacggacatgttttgaaatgcgtaaaagaccaaaatggttcttacgtggtcaggaagtgcatagagtgcgttcaacctcaaagcttgcagttcatcatcgatgcttttaaaggacaagttttcgcacttagcacgcatccttatggtaaccgcgtgatacagcgaatcctggagcactgcctgccggaccagaccctccctatactggaggagctgcaccaacatacagagcagcttgttcaggatcagtacgggagctacgtaatcgagcatgttctcgaacatggacggcctgaggataagtccaaaattgtggcagaaatccgcgggcatatcatggagttcagccaagatcaacatggttctcgatttatagaacttaaactcgagcgcgcgacccctgctgaaaggcaactcgtgttcaacgagattttgcaagctgcgtaccagttgatggttgacgtttttggaaattatgttatacaaaaattctttgaatttggtagcctcgaacagaaattggcattggctgagagaataaggggtcacgtattgagtctcgcccttcagatgtacgggtcaagggttattgaaaaagcgcttgagtttatcccatctgaccaacaaaatgaaatggtacgagagcttgacggccatgtattgaaatgcgttaaagaccagaatggaaatcacgttgttcagaagtgtatcgagtgcgtgcaacctcagagccttcagtttataattgacgccttcaaaggtcaggtattcgccctctccacccacccttatggaagtagggttataaggcgcatccttgaacactgcctccccgatcagacgttgcctatcttggaggaattgcaccagcacaccgagcaactggtccaggatcaatatggcagttacgtgataagacacgtgcttgagcacggaagaccggaagacaagtccaagattgtcgcagaaattcgagggaacgtccttgttctgtcacagcataagtttgcatcctacgttgtacgcaaatgtgtaacccatgccagccgcaccgaacgcgccgttctcattgacgaggtgtgtaccatgaacgacgggccgcactccgcactttatacgatgatgaaagatcaatatgcgtcttatgtggtggagaagatgatcgacgtggctgagcccggccaacgcaagattgtaatgcacaaaataaggccgaacgtactggttctttcccaacataagtttgccaataacgttgtacagaaatgtgtgacacatgcgtcacgaacggagagggcagttttgatagacgaagtctgcactatgaatgacgggccacactcagcattgtataccatgatgaaagaccaatatgccaactatgtggtgcaaaaaatgatcgacgttgcagagccgggtcaaaggaagatcgttatgcataagatcagacctcatatcgctactcttaggaagtacacgtacgggaagcatattcttgcaaaactggagaaatattatatgaagaatggagtggacctgggg

SEQ ID NO: 531 - protein, 644 aa, Homo sapiens
GRSRLLEDFRNNRYPNLQLREIAGHIMEFSQDQHGNRFIQLKLERATPAERQLVFNEILQAAYQLMVDVFGNYVIQKFFEFGSLEQKLALAERIRGHVLSLALQMYGSYVIRKALEFIPSDQQNEMVRELDGHVLKCVKDQNGSYVVRKCIECVQPQSLQFIIDAFKGQVFALSTHPYGNRVIQRILEHCLPDQTLPILEELHQHTEQLVQDQYGSYVIEHVLEHGRPEDKSKIVAEIRGNVLVLSQHKFASNVVEKCVTHASRTERAVLIDEVCTMNDGPHSALYTMMKDQYANYVVQKMIDVAEPGQRKIVMHKIRPHIMEFSQDQHGSRFIELKLERATPAERQLVFNEILQAAYQLMVDVFGNYVIQKFFEFGSLEQKLALAERIRGHVLSLALQMYGSYVIRKALEFIPSDQQNEMVRELDGHVLKCVKDQNGSYVVRKCIECVQPQSLQFIIDAFKGQVFALSTHPYGSRVIRRILEHCLPDQTLPILEELHQHTEQLVQDQYGSYVIEHVLEHGRPEDKSKIVAEIRGNVLVLSQHKFANNVVQKCVTHASRTERAVLIDEVCTMNDGPHSALYTMMKDQYANYVVQKMIDVAEPGQRKIVMHKIRPHIATLRKYTYGKHILAKLEKYYMKNGVDLG

SEQ ID NO: 532 - DNA, 1932 bp, Homo sapiens
ggcaggagcagactcctggaagactttaggaacaaccgctaccctaatctgcaacttagggagatagctgggcacataatggagtttagccaagaccaacacggtaaccgcttcatacaacttaagctcgagcgagcgaccccggcagagcgccaacttgtatttaatgagattttgcaggccgcttatcaattgatggttgatgtgttcggtaactatgtaattcaaaagttctttgagtttggttcactcgagcagaagcttgctctcgcggagcggattcgcggacatgttttgtcactcgcacttcagatgtatggcagttatgtaatcagaaaagccttggagtttattccttccgatcaacagaatgaaatggttagagagcttgacgggcacgtgctgaagtgtgtcaaagatcagaacggatcttacgtagttcggaaatgcattgagtgcgtccaaccgcagtcccttcaattcataatagatgcgttcaaagggcaggtcttcgctctcagtacccatccctatggaaatagagtgatccaaagaattctcgagcactgccttccagatcagacactgccaattctcgaagagctgcaccaacacaccgagcaactggtgcaagaccaatacggtagctatgtgattgagcacgttctggaacacgggcgacctgaggataagtctaagattgtcgccgaaatacgcggcaatgtacttgtcttgtctcaacacaagttcgcttctaacgtggtagaaaaatgtgtgacacacgcaagcaggaccgagagagctgtacttatcgacgaggtttgtacaatgaatgacggtccgcatagcgccttgtatacaatgatgaaagaccagtatgccaattatgttgttcagaaaatgatcgatgttgccgagcccgggcagcggaaaatagtcatgcataaaattagaccacacattatggaattctctcaggatcagcatggttcaaggtttattgagttgaaactcgaaagggctacgccggccgaaaggcaactggttttcaacgaaatacttcaagcagcttaccagcttatggtagatgtttttgggaactatgtaatacaaaagttcttcgaatttggctctttggagcagaagctcgcgttggccgagcgcattcgcggccatgtcctgtcattggccctgcagatgtacggctcctatgtgatccggaaagcgctcgaatttattccgtctgaccaacagaacgaaatggtcagagagttggacggtcacgtcctcaaatgtgtgaaagaccagaacggatcttatgttgtacgaaagtgcattgagtgtgtccaaccgcagagcttgcaatttataatcgacgccttcaagggccaagtatttgcactttctacccacccctacgggtcccgggttatacgaaggatactggaacattgcctcccggatcaaactctcccgatcctcgaggagttgcaccaacatactgagcagctcgtccaagatcaatacggaagctacgtcatcgagcacgtactggagcacggtagacccgaagataagagtaagattgtggcggagatcagggggaatgtactcgttttgtcacagcacaaatttgccaataatgtagtacagaagtgcgtgacgcatgccagccggaccgaacgggctgtgctcatagatgaggtttgtacaatgaatgatgggccacattctgctttgtatacgatgatgaaagaccagtacgctaactacgtagtacaaaaaatgatagacgtggcggagccaggacagcgcaaaatagttatgcacaaaatacgcccgcatatagctacgttgagaaaatatacttatggaaaacatatccttgctaaactcgagaaatactatatgaagaatggggttgatttggga

SEQ ID NO: 533 - protein, 644 aa, Homo sapiens
GRSRLLEDFRNNRYPNLQLREIAGHIMEFSQDQHGSRFIRLKLERATPAERQLVFNEILQAAYQLMVDVFGSYVIRKFFEFGSLEQKLALAERIRGHVLSLALQMYGSRVIEKALEFIPSDQQNEMVRELDGHVLKCVKDQNGCHVVQKCIECVQPQSLQFIIDAFKGQVFALSTHPYGCRVIQRILEHCLPDQTLPILEELHQHIMEFSQDQHGNRFIQLKLERATPAERQLVFNEILQAAYQLMVDVFGSYVIEKFFEFGSLEQKLALAERIRGHVLSLALQMYGNRVIQKALEFIPSDQQNEMVRELDGHVLKCVKDQNGSHVVEKCIECVQPQSLQFIIDAFKGQVFALSTHPYGNRVIQRILEHCLPDQTLPILEELHQHTEQLVQDQYGSYVIEHVLEHGRPEDKSKIVAEIRGNVLVLSQHKFASNVVEKCVTHASRTERAVLIDEVCTMNDGPHSALYTMMKDQYANYVVQKMIDVAEPGQRKIVMHKIRPHTEQLVQDQYGSYVIEHVLEHGRPEDKSKIVAEIRGNVLVLSQHKFASNVVEKCVTHASRTERAVLIDEVCTMNDGPHSALYTMMKDQYANYVVQKMIDVAEPGQRKIVMHKIRPHIATLRKYTYGKHILAKLEKYYMKNGVDLG

SEQ ID NO: 534 - DNA, 1932 bp, Homo sapiens
ggacggtcccggctgctagaggatttccggaacaaccgatatccgaacctgcagttgagggagatagccggtcatattatggagttctcccaggaccagcacggctctagatttatccgccttaagctggagagggcgactccagctgagaggcagcttgtctttaatgaaattctgcaggctgcatatcagctgatggtggacgttttcgggtcttacgtgatcagaaagttttttgagttcggcagcttggagcagaagctggcattggcagagcggatccgcggacacgtgctgagcctcgctcttcagatgtatgggtcaagggtaattgagaaagccctggaattcatcccctccgatcagcagaatgaaatggtaagagagcttgatggacacgtgctgaagtgcgtgaaagatcagaatggctgtcacgtagttcagaagtgcattgaatgcgttcagccacaaagtctgcaatttatcattgacgcttttaaaggtcaggtcttcgccctgagtacacacccttatggttgcagggtgattcagagaatcctggagcactgtttaccagaccagacacttcccatcctcgaggagctccatcagcatatcatggagtttagtcaagatcagcacggaaatagatttatacagctgaagctcgaacgcgcgacccctgctgagcgccagctcgtgttcaacgaaatcctgcaagctgcttaccagctgatggtcgatgtgtttggctcctacgtcattgaaaagttcttcgaatttggatccttagaacaaaagctcgctctagccgaacgtattcgcggtcatgtcttgtcgttggccctacaaatgtacggtaatcgggtgatccagaaagccttagaatttatcccttctgaccagcagaatgagatggtgcgggaattggacggccacgtgctaaaatgcgtcaaagaccagaatggatcccacgtggtcgaaaagtgcatcgaatgtgttcagccccagagcctgcagtttattatcgacgcattcaagggccaggtgttcgccttgtcaacgcacccctatgggaacagagtgatccaacgtatcctcgagcattgtctgcctgatcagacccttcccatcctggaagagctgcaccagcatactgagcaactggtccaagatcagtacggcagctatgtgattgaacatgtcttggagcacgggaggcccgaggataagtccaaaattgtggcagaaataaggggcaatgtgctcgtactcagccagcacaaattcgcgtcaaatgtagtagagaagtgtgtgactcatgccagtcggacagaacgcgcagttctgatcgacgaggtgtgtacgatgaacgacgggcctcactctgccctgtatactatgatgaaagaccagtacgccaactacgttgtgcagaagatgattgacgtggcagagccgggacaacgcaagatagttatgcacaagatccgaccccataccgagcaacttgtccaagaccaatatggctcatacgtgatcgaacacgtgttagagcatgggcggccagaggacaaatctaagatagttgctgagattagaggcaacgtcctggtcctcagccagcacaaattcgcttctaacgtcgtggaaaagtgcgtgactcatgcgtcgaggaccgaaagagccgttttaatagacgaggtctgcacaatgaatgatgggcctcacagcgcactgtacaccatgatgaaagatcagtatgccaactacgttgtgcagaaaatgattgatgtagccgagccaggtcaacgaaagatcgttatgcataaaattcgtccacacattgccacactccgaaaatatacctacggcaaacatatacttgccaagctggaaaagtactacatgaagaacggagtggacctcggg

SEQ ID NO: 535 - protein, 644 aa, Homo sapiens
GRSRLLEDFRNNRYPNLQLREIAGHIMEFSQDQHGSRFIRLKLERATPAERQLVFNEILQAAYQLMVDVFGSYVIRKFFEFGSLEQKLALAERIRGHVLSLALQMYGSRVIEKALEFIPSDQQNEMVRELDGHVLKCVKDQNGCHVVQKCIECVQPQSLQFIIDAFKGQVFALSTHPYGCRVIQRILEHCLPDQTLPILEELHQHTEQLVQDQYGNYVIQHVLEHGRPEDKSKIVAEIRGHIMEFSQDQHGSRFIELKLERATPAERQLVFNEILQAAYQLMVDVFGNYVIQKFFEFGSLEQKLALAERIRGHVLSLALQMYGSRVIEKALEFIPSDQQNEMVRELDGHVLKCVKDQNGNHVVQKCIECVQPQSLQFIIDAFKGQVFALSTHPYGSRVIERILEHCLPDQTLPILEELHQHTEQLVQDQYGSYVIEHVLEHGRPEDKSKIVAEIRGNVLVLSQHKFANNVVQKCVTHASRTERAVLIDEVCTMNDGPHSALYTMMKDQYASYVVEKMIDVAEPGQRKIVMHKIRPNVLVLSQHKFASNVVEKCVTHASRTERAVLIDEVCTMNDGPHSALYTMMKDQYANYVVQKMIDVAEPGQRKIVMHKIRPHIATLRKYTYGKHILAKLEKYYMKNGVDLG

SEQ ID NO: 536 - DNA, 1932 bp, Homo sapiens
ggaagaagcagactgctggaggatttccgcaataatagatacccgaatcttcaactgcgagaaattgcgggtcatattatggaattctctcaagatcagcacggttccagatttattcgacttaaattggaacgggccacccctgccgaaaggcagttggtattcaatgagatcctgcaagcagcataccaacttatggtcgatgtgtttgggagctacgtgatcagaaaattcttcgaattcggctctcttgagcaaaaattggccctggcggaacggataaggggccacgtacttagcttggcactgcagatgtacggttctcgcgtgatagagaaagctttggagttcattcctagtgaccaacagaacgaaatggtacgggaacttgacggccacgtcctgaagtgtgtgaaagaccagaacggttgccacgttgtacagaagtgtatagagtgcgtacaaccccagagcttgcagttcatcatagatgcgtttaaggggcaggtgtttgccttgtccacgcacccgtacggttgccgagttattcaacgaattttggagcattgcctcccggaccaaacgcttccaatcctggaggaactccaccaacacacggaacagctggttcaggatcagtatggcaattatgtaatacagcacgtacttgaacatggtcggccagaggacaagtcaaagattgtcgcagaaattcggggccatattatggagttttcccaagatcaacacggctcaaggtttattgaactcaagctggaaagggccactccggccgagcgacaactcgtctttaacgaaatattgcaggcagcatatcaactgatggtagacgtatttggaaactacgttatccaaaaattttttgaattcggaagcttggagcagaaactcgccctggccgaaaggataagggggcacgtcctctctctcgctcttcagatgtatggatcaagggtcattgaaaaagccctcgagtttattcccagcgaccagcaaaatgaaatggtaagggagttggacggccacgtgctgaaatgcgtaaaggatcaaaatggcaatcatgttgttcagaaatgcatcgaatgcgtccagccccagagtttgcagtttatcattgatgcgttcaagggtcaagtatttgcgctttctacacacccctacggaagcagggttattgagcggatacttgaacattgtctgccagaccagacgctccctattcttgaggagcttcaccaacacaccgaacaacttgtacaggaccaatatggttcctatgtcatcgagcatgtgcttgaacatggccgcccagaagacaagtctaagatcgtagcagagatacgaggaaacgtactggtacttagtcaacataagtttgcgaacaacgttgttcagaaatgcgtgacccatgcctcccgaacggaacgagctgttctgatcgatgaggtatgcactatgaacgacgggcctcacagcgcgctctataccatgatgaaagatcaatatgcatcatatgtagtggaaaagatgattgatgtcgcagagccaggacagagaaaaatagtcatgcataaaataaggccaaacgtcctggtactttctcagcacaaattcgctagtaatgtggttgaaaaatgcgtaacacacgcttcaaggactgaacgagctgtgcttatcgacgaagtttgtaccatgaatgacggtccccatagtgccctgtacacgatgatgaaagatcagtatgcgaactatgttgtacagaagatgatagacgttgcggagcctggacagcgcaaaattgtgatgcacaagatccggccccacatagctactctgagaaaatacacttacggcaaacatatccttgccaagcttgagaagtactatatgaagaacggtgttgaccttggg

SEQ ID NO: 537 - protein, 644 aa, Homo sapiens
GRSRLLEDFRNNRYPNLQLREIAGHIMEFSQDQHGSRFIRLKLERATPAERQLVFNEILQAAYQLMVDVFGSYVIRKFFEFGSLEQKLALAERIRGHVLSLALQMYGSRVIEKALEFIPSDQQNEMVRELDGHVLKCVKDQNGCHVVQKCIECVQPQSLQFIIDAFKGQVFALSTHPYGCRVIQRILEHCLPDQTLPILEELHQHTEQLVQDQYGNYVIQHVLEHGRPEDKSKIVAEIRGNVLVLSQHKFASNVVEKCVTHASRTERAVLIDEVCTMNDGPHSALYTMMKDQYANYVVQKMIDVAEPGQRKIVMHKIRPHIMEFSQDQHGSRFIELKLERATPAERQLVFNEILQAAYQLMVDVFGNYVIQKFFEFGSLEQKLALAERIRGHVLSLALQMYGSRVIEKALEFIPSDQQNEMVRELDGHVLKCVKDQNGSHVVEKCIECVQPQSLQFIIDAFKGQVFALSTHPYGNRVIQRILEHCLPDQTLPILEELHQHTEQLVQDQYGSYVIEHVLEHGRPEDKSKIVAEIRGNVLVLSQHKFASNVVEKCVTHASRTERAVLIDEVCTMNDGPHSALYTMMKDQYANYVVQKMIDVAEPGQRKIVMHKIRPHIATLRKYTYGKHILAKLEKYYMKNGVDLG

SEQ ID NO: 538 - DNA, 1932 bp, Homo sapiens
gggaggtccaggcttcttgaagattttaggaataacagataccctaatcttcaattgcgcgaaatagccggacacattatggagttttcacaagaccaacatggatccagatttatacgcttgaagttggaacgggcaaccccggcggaacgacagcttgtttttaacgagatcctgcaggctgcctatcagttgatggttgacgtatttggaagctacgtaatccggaagttctttgagttcggttcccttgaacagaagctggccctcgccgagcggattcggggacacgttctctcactggcgcttcaaatgtatggcagtagggtgatagaaaaggcacttgaatttatcccttccgatcaacagaatgaaatggttcgcgagcttgacgggcatgtcctcaaatgtgtcaaggatcagaacgggtgtcacgtcgtacaaaaatgtattgaatgcgtgcagcctcaatctctgcagttcatcattgacgcattcaaaggtcaggtgtttgctctttccacccacccgtacggctgcagggtaatccagaggattctggaacactgcctgcctgaccagactcttccaatcctggaggaactgcatcaacacaccgagcaactggttcaagaccagtatggtaactacgtgatccagcacgtattggagcacggaaggccagaagacaaatctaaaatcgttgccgagattaggggcaatgtcttggtcctctcacagcacaagttcgcatccaacgtggtagaaaaatgcgttacgcatgcttcccgaacggaacgggctgtgcttatcgatgaagtatgtacgatgaacgatggacctcattctgcattgtacacaatgatgaaggatcagtatgcaaactacgtggttcaaaagatgatagacgtcgcggaacctggccaaagaaagattgtcatgcacaagatacgccctcacattatggagttcagccaggatcagcatggatcacggtttatcgagttgaaactggaacgcgccacccctgccgaaaggcaacttgtgttcaatgagatcctgcaagcagcataccagcttatggtggatgtgttcggtaattacgtaatacagaaattttttgagttcggaagtctcgaacaaaaactcgctcttgctgagcggattcgcggtcatgttctttcacttgcactgcaaatgtacggaagcagagtaatagaaaaggcattggagtttattcctagcgatcaacagaacgagatggtccgcgagctggatggtcacgtgctcaaatgcgtaaaagaccagaatggctctcacgttgtagaaaaatgcatagagtgcgttcaacctcaatcacttcagttcattatagacgcttttaagggacaggtattcgcgctgagcacgcacccatatggaaaccgcgttatacaaagaattttggagcactgcctgcctgaccagacattgccgatcctggaggagttgcatcagcacaccgagcagttggttcaagaccagtatgggtcttatgtcatagaacacgtgcttgagcatgggcgcccagaagacaagtctaagatcgtagccgagatacggggcaacgtcttggttctctcccagcataaatttgcgtcaaacgtcgtggagaaatgcgtcactcacgcttctaggacagagcgcgccgttttgatcgatgaagtatgcactatgaacgatggaccacacagtgcactctacactatgatgaaagaccaatacgcgaattatgtagtccagaagatgatagatgtggcagagccgggccaacggaaaattgtaatgcataagattcgaccgcacattgcaacactgagaaaatacacgtacggaaaacatatactcgcgaaactcgaaaagtactatatgaagaacggggtggatctcggc

SEQ ID NO: 539 - protein, 644 aa, Homo sapiens
GRSRLLEDFRNNRYPNLQLREIAGHIMEFSQDQHGSRFIQLKLERATPAERQLVFNEILQAAYQLMVDVFGSYVIRKFFEFGSLEQKLALAERIRGHVLSLALQMYGNRVIQKALEFIPSDQQNEMVRELDGHVLKCVKDQNGSHVVEKCIECVQPQSLQFIIDAFKGQVFALSTHPYGSRVIERILEHCLPDQTLPILEELHQHIMEFSQDQHGNRFIQLKLERATPAERQLVFNEILQAAYQLMVDVFGCYVIQKFFEFGSLEQKLALAERIRGHVLSLALQMYGSYVIRKALEFIPSDQQNEMVRELDGHVLKCVKDQNGNYVVQKCIECVQPQSLQFIIDAFKGQVFALSTHPYGCRVIQRILEHCLPDQTLPILEELHQHTEQLVQDQYGSYVIRHVLEHGRPEDKSKIVAEIRGNVLVLSQHKFANNVVQKCVTHASRTERAVLIDEVCTMNDGPHSALYTMMKDQYACYVVQKMIDVAEPGQRKIVMHKIRPHTEQLVQDQYGSYVIRHVLEHGRPEDKSKIVAEIRGNVLVLSQHKFANNVVQKCVTHASRTERAVLIDEVCTMNDGPHSALYTMMKDQYASYVVEKMIDVAEPGQRKIVMHKIRPHIATLRKYTYGKHILAKLEKYYMKNGVDLG

SEQ ID NO: 540 - DNA, 1932 bp, Homo sapiens
gggcggagtcgactcctggaggactttcggaataaccgatacccaaatctgcaattgcgcgagattgctgggcatattatggagttttcccaggatcaacatggtagccggtttattcagttgaagttggagagggccactcccgctgagcgccagcttgtgttcaacgagatactgcaggccgcataccagttgatggtcgacgtttttgggtcctatgtgatacgcaagttttttgagtttggaagcctggagcagaagctggctctcgcggagaggatccgcggacatgttctttctcttgcgcttcaaatgtacggtaacagggtcatccaaaaagcactggaattcattcccagtgatcagcaaaatgagatggtgcgtgaactggacggtcacgttcttaagtgcgtgaaagaccagaatggctcgcacgtggtggagaagtgcatcgaatgcgttcagcctcagtcactgcagttcataatcgacgctttcaaagggcaggtattcgccctcagcacccacccctacggctccagggtcattgaaagaatcctggagcattgtttgccagaccagacattaccaatcctcgaagagttgcatcagcacataatggagttttctcaagaccagcatggtaatagatttatccagctcaaactcgagcgagccacaccagcagaaagacagctggtcttcaatgagatcctccaagccgcctatcagttgatggttgacgtgttcggctgctatgtcatccagaagttcttcgaatttggatcgttagagcagaaactcgcactggctgaaagaataagaggccacgtgctcagcctagccctgcagatgtacggatcatatgtaatccgtaaggctctcgaattcattcctagtgatcaacagaatgagatggtgagggaacttgacgggcatgtgctgaaatgtgtgaaggatcagaatggaaactatgtagtgcagaaatgcattgagtgtgttcaacctcagtccctgcaatttatcatcgacgcgttcaaggggcaggtgtttgccctgtctacccacccctacggatgtcgcgttattcaacggatcttagagcattgtttaccggaccaaacactgcccatcctggaagagctgcaccagcacaccgagcagctggtacaagaccagtatggatcatacgtcatcaggcacgtactggagcacggtcgaccagaagataaaagcaagatagtggccgagattagaggcaacgtacttgtcctatctcagcataagttcgcaaacaatgttgtgcagaagtgcgtgacccatgcgtctagaacagaacgggccgtgctcattgatgaggtctgcactatgaacgatggtccccactcagcactatatacgatgatgaaggaccagtacgcctgttatgtcgtccaaaaaatgattgatgttgctgaaccaggccagcgcaagattgttatgcacaaaatccggccgcataccgagcagttggtgcaggaccagtacggcagctacgtcatccgtcacgtactcgaacacgggcggcctgaagataagtctaaaattgtggctgaaattaggggcaatgtgctggtcctgagccagcacaagttcgctaacaacgtggtgcagaaatgcgtcacacatgccagtagaactgaaagggctgttttaatcgacgaagtgtgtactatgaacgatgggcctcactccgccctgtatactatgatgaaagaccaatatgcatcctatgtggtggagaagatgatagacgtggcagagcctggccagcgcaagattgtcatgcacaagatccgaccccatatcgccaccctgcggaagtacacgtacggcaaacacattctggccaaactagaaaaatactacatgaagaacggagtggatcttggc

SEQ ID NO: 541 - protein, 644 aa, Homo sapiens
GRSRLLEDFRNNRYPNLQLREIAGHIMEFSQDQHGSRFIQLKLERATPAERQLVFNEILQAAYQLMVDVFGSYVIRKFFEFGSLEQKLALAERIRGHVLSLALQMYGNRVIQKALEFIPSDQQNEMVRELDGHVLKCVKDQNGSHVVEKCIECVQPQSLQFIIDAFKGQVFALSTHPYGSRVIERILEHCLPDQTLPILEELHQHTEQLVQDQYGNYVIQHVLEHGRPEDKSKIVAEIRGHIMEFSQDQHGSRFIQLKLERATPAERQLVFNEILQAAYQLMVDVFGSYVIRKFFEFGSLEQKLALAERIRGHVLSLALQMYGNRVIQKALEFIPSDQQNEMVRELDGHVLKCVKDQNGCHVVQKCIECVQPQSLQFIIDAFKGQVFALSTHPYGSRVIRRILEHCLPDQTLPILEELHQHTEQLVQDQYGNYVIQHVLEHGRPEDKSKIVAEIRGNVLVLSQHKFACNVVQKCVTHASRTERAVLIDEVCTMNDGPHSALYTMMKDQYASYVVRKMIDVAEPGQRKIVMHKIRPNVLVLSQHKFANNVVQKCVTHASRTERAVLIDEVCTMNDGPHSALYTMMKDQYASYVVEKMIDVAEPGQRKIVMHKIRPHIATLRKYTYGKHILAKLEKYYMKNGVDLG

SEQ ID NO: 542 - DNA, 1932 bp, Homo sapiens
gggcgctctcgccttctggaagatttcaggaacaatagatatcctaacttgcagttgcgggagattgcaggccatatcatggagttttcacaggatcaacatggttcacggttcatacaacttaagttggaacgagctactccggccgagcgccaacttgtcttcaacgagattcttcaagccgcctaccagcttatggtcgacgtgtttgggtcctacgtaattaggaaatttttcgaatttggatccctcgagcaaaaactcgctttggctgagcggatccgcgggcatgtcctgtccctggctttgcagatgtacggcaatcgcgtgattcaaaaggctcttgaatttatacccagcgatcaacaaaacgagatggttagagagcttgatggacatgtactcaagtgtgtgaaagatcaaaatgggtcccatgtagtagagaagtgtatagaatgcgtacaaccccaatcccttcaatttatcattgatgctttcaagggacaagttttcgcactgtctacacatccttatggatctcgagttatagaacgaatactcgaacactgcttgcctgaccaaaccttgcctatacttgaagaactccaccaacataccgaacaactcgtacaagaccaatacggcaactacgtgatacaacatgtcctcgaacatggtaggcctgaggataagtcaaaaattgtagcagagatacgaggtcacataatggagttctcacaagaccaacacggatctcgattcatccagctgaaacttgaacgagctaccccagcagagaggcagttggtctttaacgagatcctccaagctgcgtaccagctcatggtcgacgtctttggttcttacgtcattcgcaaattctttgaatttggatcactggagcagaagctcgcccttgctgaacgaattagaggccacgttctgtcacttgcgctccaaatgtatgggaaccgagtcattcaaaaggctctggaattcatcccgagcgatcagcagaatgagatggttagagagctcgacggacacgtgctgaaatgcgtgaaagatcaaaacggatgtcacgttgttcagaagtgcatcgagtgtgtgcaaccacaaagtctccagttcattatagacgcgttcaaaggccaggtctttgccctctccacacacccatacggctcacgggtcatacgacggattctcgagcactgccttcctgatcagacacttcctatacttgaggaactccatcaacatacggaacaattggtccaggaccaatatggtaattatgtaatccaacatgttttggagcacggacggcccgaagacaaatcaaagatagtagccgaaataaggggaaatgtactcgtactgtctcaacacaaatttgcctgtaatgtcgttcagaaatgtgtcacccacgcatcaagaacagagagagccgttcttatcgatgaagtttgtaccatgaatgacggtccgcactctgccctctacacgatgatgaaagaccaatatgccagttacgtagtccggaaaatgattgacgttgcagagcccggacaacggaagatcgttatgcacaagatccgcccgaacgtcctggtactgtctcagcacaagtttgcaaacaatgtggtgcaaaagtgtgtaacacatgcttcaaggactgagagggctgtgcttatagacgaggtctgcactatgaatgacggcccacactcagcactgtataccatgatgaaagatcagtacgctagctatgttgttgagaaaatgatagacgttgcggaaccggggcaaaggaagatagtaatgcataaaatacgacctcacatcgctacgctccgcaaatatacgtacgggaaacatatcctcgcgaaactggagaaatactatatgaaaaacggagtggacttgggg

SEQ ID NO: 543 - protein, 644 aa, Homo sapiens
GRSRLLEDFRNNRYPNLQLREIAGHIMEFSQDQHGSRFIQLKLERATPAERQLVFNEILQAAYQLMVDVFGSYVIRKFFEFGSLEQKLALAERIRGHVLSLALQMYGNRVIQKALEFIPSDQQNEMVRELDGHVLKCVKDQNGSHVVEKCIECVQPQSLQFIIDAFKGQVFALSTHPYGSRVIERILEHCLPDQTLPILEELHQHTEQLVQDQYGNYVIQHVLEHGRPEDKSKIVAEIRGNVLVLSQHKFACNVVQKCVTHASRTERAVLIDEVCTMNDGPHSALYTMMKDQYASYVVRKMIDVAEPGQRKIVMHKIRPHIMEFSQDQHGNRFIQLKLERATPAERQLVFNEILQAAYQLMVDVFGCYVIQKFFEFGSLEQKLALAERIRGHVLSLALQMYGSYVIRKALEFIPSDQQNEMVRELDGHVLKCVKDQNGNYVVQKCIECVQPQSLQFIIDAFKGQVFALSTHPYGCRVIQRILEHCLPDQTLPILEELHQHTEQLVQDQYGSYVIRHVLEHGRPEDKSKIVAEIRGNVLVLSQHKFANNVVQKCVTHASRTERAVLIDEVCTMNDGPHSALYTMMKDQYASYVVEKMIDVAEPGQRKIVMHKIRPHIATLRKYTYGKHILAKLEKYYMKNGVDLG

SEQ ID NO: 544 - DNA, 1932 bp, Homo sapiens
ggtaggagtcggctcttggaagacttcagaaacaatcgatacccgaatttgcaacttagagaaatagccggccatattatggaattctcacaggatcagcacggttcccgcttcattcaacttaaactcgaacgcgctacaccagccgaacggcaattggtgtttaacgagattttgcaagccgcgtatcaattgatggtcgatgtctttggctcttacgtcatcagaaagttcttcgagttcggttcactggagcaaaagctggcccttgccgaacgcataaggggccatgttctgtcccttgcactgcagatgtatgggaacagagtaattcaaaaggcccttgagttcataccttcagaccagcaaaatgaaatggtaagggagctggatggtcacgtgctcaaatgtgtgaaggaccagaatggctcccacgtggtagagaaatgtatagaatgcgtccaaccacaatctcttcaattcatcatcgatgcctttaaaggtcaagtgtttgcgcttagtacacatccttacggatctagggtcattgagaggatactcgaacactgtcttcccgaccagaccctgccaatcctggaggagcttcatcaacacacggaacagcttgtccaggaccaatacgggaattatgtgatacagcacgtattggaacacgggcggcctgaagacaaaagcaagatcgtggctgaaattagaggaaacgtacttgtactctctcagcacaaattcgcttgcaacgtggtacaaaagtgtgtcacacacgcttcacgcacagagagagcggtgctgatagacgaagtctgcactatgaatgatggccctcattcagctctttatactatgatgaaagaccagtacgcaagttatgtggtccggaagatgattgatgttgcagagcctggtcaaaggaaaatcgtgatgcacaaaataaggccacatattatggaattttcacaagatcagcacggaaaccggttcatccaacttaaactggaacgagccacgcctgcagaaaggcagctggttttcaatgagatattgcaagctgcataccaactgatggtggatgtcttcggctgttatgttatccagaaattctttgaatttgggagcttggagcagaaacttgccttggctgaacgaattaggggacacgtcctttcacttgcccttcaaatgtacggatcttacgtgattcggaaggcactggaatttataccttcagaccagcagaatgaaatggtaagggagcttgatggccatgtgcttaagtgtgtcaaagatcaaaacgggaactacgttgttcagaagtgcatagaatgtgtgcagccacaaagccttcagtttatcatcgacgctttcaaaggccaagttttcgccctttccacgcatccgtacggttgtcgagttatacagagaatcctcgaacattgcttgccagaccagacattgcctatcttggaagaattgcaccaacacactgaacaactggtccaagatcagtacgggagctacgtaatcaggcatgtcctcgagcacgggcgaccagaggacaaatcaaaaatagtggccgagatccgagggaacgtactcgtcttgagtcagcacaaattcgctaacaatgtcgtacagaagtgcgttacacatgcctctcgaacggaaagagctgtactcatagacgaagtttgtaccatgaatgatggccctcattcagcgctttacactatgatgaaagatcagtacgcaagttacgtcgttgagaaaatgatcgacgttgccgagcctggacaacgaaagatcgtcatgcacaagattcggccgcatatcgcgacacttcggaaatatacatatgggaaacacattcttgctaagctggagaaatattatatgaaaaacggagttgatcttggg

SEQ ID NO: 545 - protein, 630 aa, Homo sapiens
GRSRLLEDFRNNRYPNLQLREIAGELHQHTEQLVQDQYGSYVIRHVLEHGRPEDKSKIVAELHQHTEQLVQDQYGNYVIQHVLEHGRPEDKSKIVAELHQHTEQLVQDQYGCYVIQHVLEHGRPEDKSKIVAELHQHTEQLVQDQYGSYVIRHVLEHGRPEDKSKIVAELHQHTEQLVQDQYGCYVIQHVLEHGRPEDKSKIVAELHQHTEQLVQDQYGNYVIQHVLEHGRPEDKSKIVAELHQHTEQLVQDQYGSYVIRHVLEHGRPEDKSKIVAELHQHTEQLVQDQYGNYVIQHVLEHGRPEDKSKIVAELHQHTEQLVQDQYGNYVIQHVLEHGRPEDKSKIVAELHQHTEQLVQDQYGCYVIQHVLEHGRPEDKSKIVAELHQHTEQLVQDQYGSYVIRHVLEHGRPEDKSKIVAELHQHTEQLVQDQYGSYVIEHVLEHGRPEDKSKIVAELHQHTEQLVQDQYGSYVIEHVLEHGRPEDKSKIVAELHQHTEQLVQDQYGNYVIQHVLEHGRPEDKSKIVAELHQHTEQLVQDQYGSYVIEHVLEHGRPEDKSKIVAELHQHTEQLVQDQYGSYVIRHVLEHGRPEDKSKIVAHIATLRKYTYGKHILAKLEKYYMKNGVDLG

SEQ ID NO: 546 - DNA, 1890 bp, Homo sapiens
gggcggagccgccttttggaagacttccgaaacaacagatacccaaacctgcagcttcgggaaattgcgggggaactccaccaacatacggaacagttggtacaagatcaatacggtagttatgtcattcggcacgttcttgaacacggtcgcccagaggacaagagtaaaattgtagctgagctgcaccagcacacggaacagctcgtgcaagaccagtatgggaattatgtcattcagcacgttttggaacacggcagacctgaagataaatctaagattgttgcggaactgcaccagcatactgagcagctcgttcaggatcaatatggctgctacgttatacaacacgtcctggagcatggacgccctgaggacaaaagtaagattgttgcagagctgcatcaacacacagagcaacttgttcaagatcaatatggatcatacgttattcggcacgtgttggagcatggtagacctgaagacaagagcaagattgtggccgagctgcaccagcataccgagcagcttgtacaggaccaatacggatgttacgtgattcaacacgtgcttgagcacggcagaccagaggataaatctaaaatcgttgctgagctccatcaacatacagagcagttggttcaagatcaatatggtaattacgtgatacaacacgtacttgaacacgggcgacccgaggacaaatcaaaaatcgtggcagaattgcatcagcatacggaacaattggttcaagatcaatatgggtcctacgtaatacggcatgtattggagcacggaagaccagaagataaatcaaaaatcgtcgctgagttgcaccaacacacagagcaactggtccaggaccaatacggcaattacgttatccaacatgttttggagcatggacggccagaagataagtctaaaatagtggcggaactccaccagcacaccgagcagcttgtacaagatcaatacggaaattacgttattcaacatgttcttgaacatggtcgacccgaggataagtcaaagatcgtggcggagcttcaccaacacactgagcaactcgtacaagatcagtacggatgttacgtcatccagcatgtattggaacacggtcgacccgaggacaagtctaagattgttgctgagcttcaccagcacaccgagcaacttgtccaagatcaatatggaagttacgtaatccggcacgttttggagcatggaaggcccgaagacaagagtaaaatagttgcagagctgcatcaacacactgaacaactggtacaggatcagtacggaagctacgtgatcgaacacgtactcgaacatggcagaccagaagataagtcaaaaatagtagccgagttgcatcaacatactgagcaactggtccaggaccaatacggatcttatgtaatcgagcatgtgttggagcatggccgacctgaagataagtccaagattgtagcagagttgcatcaacatacagaacaactggttcaagaccagtatggcaattatgttatccagcacgttcttgaacatggtcggcctgaggataagtccaaaatagtcgccgagttgcatcagcacaccgagcagctggtccaagatcaatacggttcatacgtaattgaacatgtattggaacatggccggcctgaggataaatcaaaaatagttgcggagcttcatcaacatactgaacaactggttcaagatcaatacggctcatacgtaattaggcatgttttggagcatgggcgcccagaggacaagtcaaaaatagtcgctcacatagcgaccctgagaaaatacacatatgggaaacacatcctcgcaaagctcgaaaagtactatatgaagaatggcgtggatctcggc

SEQ ID NO: 547 - protein, 630 aa, Homo sapiens
GRSRLLEDFRNNRYPNLQLREIAGHTEQLVQDQYGSYVIRHVLEHGRPEDKSKIVAEIRGHTEQLVQDQYGNYVIQHVLEHGRPEDKSKIVAEIRGHTEQLVQDQYGCYVIQHVLEHGRPEDKSKIVAEIRGHTEQLVQDQYGSYVIRHVLEHGRPEDKSKIVAEIRGHTEQLVQDQYGCYVIQHVLEHGRPEDKSKIVAEIRGHTEQLVQDQYGNYVIQHVLEHGRPEDKSKIVAEIRGHTEQLVQDQYGSYVIRHVLEHGRPEDKSKIVAEIRGHTEQLVQDQYGNYVIQHVLEHGRPEDKSKIVAEIRGHTEQLVQDQYGNYVIQHVLEHGRPEDKSKIVAEIRGHTEQLVQDQYGCYVIQHVLEHGRPEDKSKIVAEIRGHTEQLVQDQYGSYVIRHVLEHGRPEDKSKIVAEIRGHTEQLVQDQYGSYVIEHVLEHGRPEDKSKIVAEIRGHTEQLVQDQYGSYVIEHVLEHGRPEDKSKIVAEIRGHTEQLVQDQYGNYVIQHVLEHGRPEDKSKIVAEIRGHTEQLVQDQYGSYVIEHVLEHGRPEDKSKIVAEIRGHTEQLVQDQYGSYVIRHVLEHGRPEDKSKIVAEIRGHIATLRKYTYGKHILAKLEKYYMKNGVDLG

SEQ ID NO: 548 - DNA, 1890 bp, Homo sapiens
ggacggagtcgcctgctggaagatttccggaacaaccgatacccgaacctccaattgcgagaaatcgcaggacacacggagcagctggttcaggaccagtacggatcatacgtaatcaggcatgttcttgaacatggtcgaccagaagacaaaagtaagattgtcgctgaaattaggggacacactgaacaactggtgcaggatcaatacggtaattacgtcatccaacatgtgttggagcatggaaggcccgaggataaatctaaaatcgtagcggaaataagaggccataccgagcaacttgtccaagatcagtacggatgttatgttatacaacatgtgctcgaacacgggcgcccagaggataaatcaaagatcgtggcagagataagaggacatactgaacaactcgtacaggatcagtacggttcctacgtcatacggcacgtgcttgagcacggtcgccccgaagacaagagtaagatagtcgcggaaattcgcggacatacggaacaattggtacaggatcaatacggatgttacgttatccagcatgtactggaacatggacgacccgaggacaaatccaaaatcgtagcagaaattcgagggcataccgagcaattggtacaggaccaatacgggaattatgtcatacaacacgttctcgagcacgggagaccagaagataagtctaagatagtggcggaaattcgggggcatacagagcagcttgtccaggaccaatacgggtcctacgtcatccgacacgttttggagcacggtcgcccagaagataaaagcaagatagtagccgaaatcagaggccacacagagcaactcgtgcaggatcagtatggaaactacgtgatacagcacgtcttggaacatggtaggcccgaagacaaaagtaaaattgtcgcggagatccgcgggcacacggaacagttggtgcaggatcaatatgggaattatgtaatccaacatgtcttggagcacggccgacctgaggacaagagcaagattgtagctgagatccggggccatactgagcagttggtccaagatcagtatggttgttacgtaattcaacatgtcttggagcacggacgacctgaagacaaaagcaaaattgtcgcggagatcagaggccacaccgaacaattggtgcaagaccagtacggttcatacgtgattagacatgtgctggagcatgggcggcctgaagacaagagcaagatcgttgccgaaatccgggggcatactgaacaactcgttcaggatcagtatggctcatatgtcatcgaacacgtactcgaacacggaagacccgaggataaatccaaaatagtagcagaaatacggggtcacaccgaacagctcgtacaggatcagtacggaagctatgttatcgaacatgtactggagcatgggcgcccagaagataaatctaaaattgtggcggaaattcggggtcacacagagcaactggtgcaagatcaatatggaaactatgtgatacaacatgtcctggaacacggcaggcctgaggataagagtaagattgtcgctgaaatccgggggcacactgagcaacttgtacaagaccaatacggttcatacgtcatagagcacgtactcgagcacggtaggcctgaggataaaagcaagatcgtcgctgaaatcaggggccacactgaacaactggtgcaagatcaatacggaagttatgtaataaggcatgtcctcgaacacgggcggcccgaggataaatctaagattgtggccgaaataaggggtcatatagccacccttaggaaatatacatatgggaagcacatcttggccaaacttgaaaagtactatatgaagaacggagtagacctgggg

SEQ ID NO: 549 - RNA, 8 nt, Homo sapiens
ucaucaug

SEQ ID NO: 550 - RNA, 16 nt, Homo sapiens
gucaucaucaugguca

SEQ ID NO: 551 - DNA, 16 bp, Homo sapiens
gtgattattatggtga

SEQ ID NO: 552 - RNA, 8 nt, Homo sapiens
ccuguggu

SEQ ID NO: 553 - RNA, 16 nt, Homo sapiens
uugcccugugguccuu

SEQ ID NO: 554 - DNA, 15 bp, Homo sapiens
tcgctctctggtctt

SEQ ID NO: 555 - RNA, 8 nt, Homo sapiens
ggugugua

SEQ ID NO: 556 - RNA, 16 nt, Homo sapiens
uggugguguguaagcc

SEQ ID NO: 557 - DNA, 16 bp, Homo sapiens
tcgtcgtctgcaaacc

SEQ ID NO: 558 - RNA, 8 nt, Homo sapiens
ucuacguc

SEQ ID NO: 559 - RNA, 16 nt, Homo sapiens
acgcucuacgucaccg

SEQ ID NO: 560 - DNA, 16 bp, Homo sapiens
accctgtatgtgacag

SEQ ID NO: 561 - RNA, 14 nt, Homo sapiens
guggcauucuacau

SEQ ID NO: 562 - RNA, 16 nt, Homo sapiens
cguggcauucuacauc

SEQ ID NO: 563 - DNA, 16 bp, Homo sapiens
cgtagctttttatatt

SEQ ID NO: 564 - RNA, 8 nt, Homo sapiens
cgggugug

SEQ ID NO: 565 - RNA, 8 nt, Homo sapiens
caguucuc

SEQ ID NO: 566 - RNA, 8 nt, Homo sapiens
cugggcuu

SEQ ID NO: 567 - RNA, 8 nt, Homo sapiens
aaccuagc

SEQ ID NO: 568 - RNA, 8 nt, Homo sapiens
ugguccug

SEQ ID NO: 569 - RNA, 8 nt, Homo sapiens
uucgggga

SEQ ID NO: 570 - RNA, 8 nt, Homo sapiens
ugccauca

SEQ ID NO: 571 - RNA, 8 nt, Homo sapiens
cguggucc

SEQ ID NO: 572 - RNA, 8 nt, Homo sapiens
gcagcagg

SEQ ID NO: 573 - RNA, 8 nt, Homo sapiens
gcuuuccu

SEQ ID NO: 574 - RNA, 8 nt, Homo sapiens
ucgguccc

SEQ ID NO: 575 - RNA, 8 nt, Homo sapiens
gcgccgcc

SEQ ID NO: 576 - RNA, 8 nt, Homo sapiens
aacccugu

SEQ ID NO: 577 - RNA, 8 nt, Homo sapiens
acuauagg

SEQ ID NO: 578 - RNA, 8 nt, Homo sapiens
cacauagg

SEQ ID NO: 579 - RNA, 16 nt, Homo sapiens
gcgacgggugugguac

SEQ ID NO: 580 - RNA, 16 nt, Homo sapiens
auggcaguucuccaug

SEQ ID NO: 581 - RNA, 16 nt, Homo sapiens
cgugcugggcuucccc

SEQ ID NO: 582 - RNA, 16 nt, Homo sapiens
gcucaaccuagccgug

SEQ ID NO: 583 - RNA, 16 nt, Homo sapiens
uuggugguccuggcca

SEQ ID NO: 584 - RNA, 16 nt, Homo sapiens
ccgcuucggggagaac

SEQ ID NO: 585 - RNA, 16 nt, Homo sapiens
accaugccaucauggg

SEQ ID NO: 586 - RNA, 16 nt, Homo sapiens
uguucgugguccacuu

SEQ ID NO: 587 - RNA, 16 nt, Homo sapiens
cccagcagcaggaguc

SEQ ID NO: 588 - RNA, 16 nt, Homo sapiens
caucgcuuuccugauc

SEQ ID NO: 589 - RNA, 16 nt, Homo sapiens
aacuucggucccaucu

SEQ ID NO: 590 - RNA, 16 nt, Homo sapiens
aagagcgccgccaucu

SEQ ID NO: 591 - RNA, 16 nt, Homo sapiens
cuacaacccugucauc

SEQ ID NO: 592 - RNA, 16 nt, Homo sapiens
gccgacuauaggcguc

SEQ ID NO: 593 - RNA, 16 nt, Homo sapiens
aagucacauaggcucc

SEQ ID NO: 594 - DNA, 16 bp, Homo sapiens
gccaccggcgtcgtgc

SEQ ID NO: 595 - DNA, 16 bp, Homo sapiens
ctggcaattttctatg

SEQ ID NO: 596 - DNA, 16 bp, Homo sapiens
tgtcctcggatttcct

SEQ ID NO: 597 - DNA, 16 bp, Homo sapiens
cctgaatctggctgtc

SEQ ID NO: 598 - DNA, 16 bp, Homo sapiens
ttagtcgtgctcgcta

SEQ ID NO: 599 - DNA, 16 bp, Homo sapiens
tcggtttggcgaaaat

SEQ ID NO: 600 - DNA, 16 bp, Homo sapiens
atcacgctattatggg

SEQ ID NO: 601 - DNA, 16 bp, Homo sapiens
tgtttgtcgtgcattt

SEQ ID NO: 602 - DNA, 16 bp, Homo sapiens
ctcaacaacaagaatc

SEQ ID NO: 603 - DNA, 16 bp, Homo sapiens
gattgcatttctcatt

SEQ ID NO: 604 - DNA, 16 bp, Homo sapiens
aattttggccctattt

SEQ ID NO: 605 - DNA, 16 bp, Homo sapiens
aaaagtgctgctattt

SEQ ID NO: 606 - DNA, 16 bp, Homo sapiens
ttataatccagtgatt

SEQ ID NO: 607 - DNA, 16 bp, Homo sapiens
gcagattagagccgac

SEQ ID NO: 608 - DNA, 16 bp, Homo sapiens
aactctcagagcctct

SEQ ID NO: 609 - protein, 11 aa, Homo sapiens
QHGSRFIQLKL

SEQ ID NO: 610 - protein, 11 aa, Homo sapiens
VFGNYVIQKFF

SEQ ID NO: 611 - protein, 11 aa, Homo sapiens
MYGCRVIQKAL

SEQ ID NO: 612 - protein, 11 aa, Homo sapiens
QNGNHVVQKCI

SEQ ID NO: 613 - protein, 11 aa, Homo sapiens
PYGCRVIQRIL

SEQ ID NO: 614 - protein, 11 aa, Homo sapiens
QYGNYVIQHVL

SEQ ID NO: 615 - protein, 11 aa, Homo sapiens
KFASNVVEKCV

SEQ ID NO: 616 - protein, 11 aa, Homo sapiens
QYANYVVQKMI

SEQ ID NO: 617 - DNA, 1047 bp, Homo sapiens
ggcaggagcaggcttttggaagattttcgaaacaaccggtaccccaatttacaactgcgggagattgctggacatataatggaattttcccaagaccagcatgggtccagattcattcagctgaaactggagcgtgccacaccagctgagcgccagcttgtcttcaatgaaatcctccaggctgcctaccaactcatggtggatgtgtttggtaattacgtcattcagaagttctttgaatttggcagtcttgaacagaagctggctttggcagaacggattcgaggccacgtcctgtcattggcactacagatgtatggctgccgtgttatccagaaagctcttgagtttattccttcagaccagcagaatgagatggttcgggaactagatggccatgtcttgaagtgtgtgaaagatcagaatggcaatcacgtggttcagaaatgcattgaatgtgtacagccccagtctttgcaatttatcatcgatgcgtttaagggacaggtatttgccttatccacacatccttatggctgccgagtgattcagagaatcctggagcactgtctccctgaccagacactccctattttagaggagcttcaccagcacacagagcagcttgtacaggatcaatatggaaattatgtaatccaacatgtactggagcacggtcgtcctgaggataaaagcaaaattgtagcagaaatccgaggcaatgtacttgtattgagtcagcacaaatttgcaagcaatgttgtggagaagtgtgttactcacgcctcacgtacggagcgcgctgtgctcatcgatgaggtgtgcaccatgaacgacggtccccacagtgccttatacaccatgatgaaggaccagtatgccaactacgtggtccagaagatgattgacgtggcggagccaggccagcggaagatcgtcatgcataagatccggccccacatcgcaactcttcgtaagtacacctatggcaagcacattctggccaagctggagaagtactacatgaagaacggtgttgacttaggg

SEQ ID NO: 618 - protein, 351 aa, Homo sapiens
GRSRLLEDFRNNRYPNLQLREIAGHIMEFSQDQHGSRFIQLKLERATPAERQLVFNEILQAAYQLMVDVFGNYVIQKFFEFGSLEQKLALAERIRGHVLSLALQMYGCRVIQKALEFIPSDQQVINEMVRELDGHVLKCVKDQNGNHVVQKCIECVQPQSLQFIIDAFKGQVFALSTHPYGCRVIQRILEHCLPDQTLPILEELHQHTEQLVQDQYGNYVIQHVLEHGRPEDKSKIVAEIRGNVLVLSQHKFASNVVEKCVTHASRTERAVLIDEVCTMNDGPHSALYTMMKDQYANYVVQKMIDVAEPGQRKIVMHKIRPHIATLRKYTYGKHILAKLEKYYMKNGVDLG

SEQ ID NO: 619 - DNA, 26 bp, Homo sapiens
tggggtttttcccattcccaggactg

SEQ ID NO: 620 - DNA, 26 bp, Homo sapiens
ggggtttttcccattcccaggactgc

SEQ ID NO: 621 - DNA, 26 bp, Homo sapiens
gggtttttcccattcccaggactgcc

SEQ ID NO: 622 - DNA, 26 bp, Homo sapiens
ggtttttcccattcccaggactgcct

SEQ ID NO: 623 - DNA, 26 bp, Homo sapiens
gtttttcccattcccaggactgcctc

SEQ ID NO: 624 - DNA, 26 bp, Homo sapiens
tttttcccattcccaggactgcctcc

SEQ ID NO: 625 - DNA, 26 bp, Homo sapiens
ttttcccattcccaggactgcctcct

SEQ ID NO: 626 - DNA, 26 bp, Homo sapiens
tttcccattcccaggactgcctcctc

SEQ ID NO: 627 - DNA, 26 bp, Homo sapiens
ttcccattcccaggactgcctcctcc

SEQ ID NO: 628 - DNA, 26 bp, Homo sapiens
tcccattcccaggactgcctcctcca

SEQ ID NO: 629 - DNA, 26 bp, Homo sapiens
cccattcccaggactgcctcctccac

SEQ ID NO: 630 - DNA, 26 bp, Homo sapiens
ccattcccaggactgcctcctccacc

SEQ ID NO: 631 - DNA, 26 bp, Homo sapiens
cattcccaggactgcctcctccacct

SEQ ID NO: 632 - DNA, 26 bp, Homo sapiens
attcccaggactgcctcctccacctc

SEQ ID NO: 633 - DNA, 26 bp, Homo sapiens
ttcccaggactgcctcctccacctct

SEQ ID NO: 634 - DNA, 26 bp, Homo sapiens
tcccaggactgcctcctccacctcta

SEQ ID NO: 635 - DNA, 26 bp, Homo sapiens
cccaggactgcctcctccacctctag

SEQ ID NO: 636 - DNA, 26 bp, Homo sapiens
ccaggactgcctcctccacctctagc

SEQ ID NO: 637 - DNA, 26 bp, Homo sapiens
caggactgcctcctccacctctagcc

SEQ ID NO: 638 - DNA, 26 bp, Homo sapiens
aggactgcctcctccacctctagccc

SEQ ID NO: 639 - DNA, 26 bp, Homo sapiens
ggactgcctcctccacctctagcccc

SEQ ID NO: 640 - DNA, 26 bp, Homo sapiens
gactgcctcctccacctctagcccca

SEQ ID NO: 641 - DNA, 26 bp, Homo sapiens
actgcctcctccacctctagccccag

SEQ ID NO: 642 - DNA, 26 bp, Homo sapiens
ctgcctcctccacctctagccccagg

SEQ ID NO: 643 - DNA, 26 bp, Homo sapiens
tgcctcctccacctctagccccaggg

SEQ ID NO: 644 - DNA, 26 bp, Homo sapiens
gcctcctccacctctagccccagggg

SEQ ID NO: 645 - DNA, 26 bp, Homo sapiens
cctcctccacctctagccccagggga

SEQ ID NO: 646 - DNA, 26 bp, Homo sapiens
ctcctccacctctagccccaggggac

SEQ ID NO: 647 - DNA, 26 bp, Homo sapiens
tcctccacctctagccccaggggact

SEQ ID NO: 648 - DNA, 26 bp, Homo sapiens
cctccacctctagccccaggggactc

SEQ ID NO: 649 - DNA, 26 bp, Homo sapiens
ctccacctctagccccaggggactct

SEQ ID NO: 650 - DNA, 26 bp, Homo sapiens
tccacctctagccccaggggactctg

SEQ ID NO: 651 - DNA, 26 bp, Homo sapiens
ccacctctagccccaggggactctgt

SEQ ID NO: 652 - DNA, 26 bp, Homo sapiens
cacctctagccccaggggactctgtg

SEQ ID NO: 653 - DNA, 26 bp, Homo sapiens
acctctagccccaggggactctgtgc

SEQ ID NO: 654 - DNA, 26 bp, Homo sapiens
cctctagccccaggggactctgtgct

SEQ ID NO: 655 - DNA, 26 bp, Homo sapiens
ctctagccccaggggactctgtgctg

SEQ ID NO: 656 - DNA, 26 bp, Homo sapiens
tctagccccaggggactctgtgctgc

SEQ ID NO: 657 - DNA, 26 bp, Homo sapiens
ctagccccaggggactctgtgctgct

SEQ ID NO: 658 - DNA, 26 bp, Homo sapiens
tagccccaggggactctgtgctgctt

SEQ ID NO: 659 - DNA, 26 bp, Homo sapiens
agccccaggggactctgtgctgcttg

SEQ ID NO: 660 - DNA, 26 bp, Homo sapiens
gccccaggggactctgtgctgcttgg

SEQ ID NO: 661 - DNA, 26 bp, Homo sapiens
ccccaggggactctgtgctgcttggc

SEQ ID NO: 662 - DNA, 26 bp, Homo sapiens
cccaggggactctgtgctgcttggct

SEQ ID NO: 663 - DNA, 26 bp, Homo sapiens
ccaggggactctgtgctgcttggctc

SEQ ID NO: 664 - DNA, 26 bp, Homo sapiens
caggggactctgtgctgcttggctct

SEQ ID NO: 665 - DNA, 26 bp, Homo sapiens
aggggactctgtgctgcttggctctg

SEQ ID NO: 666 - DNA, 26 bp, Homo sapiens
ggggactctgtgctgcttggctctgc

SEQ ID NO: 667 - DNA, 26 bp, Homo sapiens
gggactctgtgctgcttggctctgct

SEQ ID NO: 668 - DNA, 26 bp, Homo sapiens
ggactctgtgctgcttggctctgctc

SEQ ID NO: 669 - DNA, 26 bp, Homo sapiens
gactctgtgctgcttggctctgctca

SEQ ID NO: 670 - DNA, 26 bp, Homo sapiens
actctgtgctgcttggctctgctcat

SEQ ID NO: 671 - DNA, 26 bp, Homo sapiens
ctctgtgctgcttggctctgctcatt

SEQ ID NO: 672 - DNA, 26 bp, Homo sapiens
tctgtgctgcttggctctgctcattg

SEQ ID NO: 673 - DNA, 26 bp, Homo sapiens
ctgtgctgcttggctctgctcattgc

SEQ ID NO: 674 - DNA, 26 bp, Homo sapiens
tgtgctgcttggctctgctcattgct

SEQ ID NO: 675 - DNA, 26 bp, Homo sapiens
gtgctgcttggctctgctcattgctc

SEQ ID NO: 676 - DNA, 26 bp, Homo sapiens
tgctgcttggctctgctcattgctca

SEQ ID NO: 677 - DNA, 26 bp, Homo sapiens
gctgcttggctctgctcattgctcaa

SEQ ID NO: 678 - DNA, 26 bp, Homo sapiens
ctgcttggctctgctcattgctcaat

SEQ ID NO: 679 - DNA, 26 bp, Homo sapiens
tgcttggctctgctcattgctcaatc

SEQ ID NO: 680 - DNA, 26 bp, Homo sapiens
gcttggctctgctcattgctcaatcc

SEQ ID NO: 681 - DNA, 26 bp, Homo sapiens
cttggctctgctcattgctcaatcca

SEQ ID NO: 682 - DNA, 26 bp, Homo sapiens
ttggctctgctcattgctcaatccag

SEQ ID NO: 683 - DNA, 26 bp, Homo sapiens
tggctctgctcattgctcaatccagc

SEQ ID NO: 684 - DNA, 26 bp, Homo sapiens
ggctctgctcattgctcaatccagcc

SEQ ID NO: 685 - DNA, 26 bp, Homo sapiens
gctctgctcattgctcaatccagcca

SEQ ID NO: 686 - DNA, 26 bp, Homo sapiens
ctctgctcattgctcaatccagccat

SEQ ID NO: 687 - DNA, 26 bp, Homo sapiens
tctgctcattgctcaatccagccatc

SEQ ID NO: 688 - DNA, 26 bp, Homo sapiens
ctgctcattgctcaatccagccatcc

SEQ ID NO: 689 - DNA, 26 bp, Homo sapiens
tgctcattgctcaatccagccatccc

SEQ ID NO: 690 - DNA, 26 bp, Homo sapiens
gctcattgctcaatccagccatccca

SEQ ID NO: 691 - DNA, 26 bp, Homo sapiens
ctcattgctcaatccagccatcccag

SEQ ID NO: 692 - DNA, 26 bp, Homo sapiens
tcattgctcaatccagccatcccagg

SEQ ID NO: 693 - DNA, 26 bp, Homo sapiens
cattgctcaatccagccatcccaggg

SEQ ID NO: 694 - DNA, 26 bp, Homo sapiens
attgctcaatccagccatcccagggt

SEQ ID NO: 695 - DNA, 26 bp, Homo sapiens
ttgctcaatccagccatcccagggtc

SEQ ID NO: 696 - DNA, 26 bp, Homo sapiens
tgctcaatccagccatcccagggtca

SEQ ID NO: 697 - DNA, 26 bp, Homo sapiens
gctcaatccagccatcccagggtcag

SEQ ID NO: 698 - DNA, 26 bp, Homo sapiens
ctcaatccagccatcccagggtcagg

SEQ ID NO: 699 - DNA, 26 bp, Homo sapiens
tcaatccagccatcccagggtcaggg

SEQ ID NO: 700 - DNA, 26 bp, Homo sapiens
caatccagccatcccagggtcaggga

SEQ ID NO: 701 - DNA, 26 bp, Homo sapiens
aatccagccatcccagggtcagggat

SEQ ID NO: 702 - DNA, 26 bp, Homo sapiens
atccagccatcccagggtcagggatc

SEQ ID NO: 703 - DNA, 26 bp, Homo sapiens
tccagccatcccagggtcagggatca

SEQ ID NO: 704 - DNA, 26 bp, Homo sapiens
ccagccatcccagggtcagggatcag

SEQ ID NO: 705 - DNA, 26 bp, Homo sapiens
cagccatcccagggtcagggatcagg

SEQ ID NO: 706 - DNA, 26 bp, Homo sapiens
agccatcccagggtcagggatcaggt

SEQ ID NO: 707 - DNA, 26 bp, Homo sapiens
gccatcccagggtcagggatcaggtg

SEQ ID NO: 708 - DNA, 26 bp, Homo sapiens
ccatcccagggtcagggatcaggtgg

SEQ ID NO: 709 - DNA, 26 bp, Homo sapiens
catcccagggtcagggatcaggtgga

SEQ ID NO: 710 - DNA, 26 bp, Homo sapiens
atcccagggtcagggatcaggtggaa

SEQ ID NO: 711 - DNA, 26 bp, Homo sapiens
tcccagggtcagggatcaggtggaag

SEQ ID NO: 712 - DNA, 26 bp, Homo sapiens
cccagggtcagggatcaggtggaagc

SEQ ID NO: 713 - DNA, 26 bp, Homo sapiens
ccagggtcagggatcaggtggaagct

SEQ ID NO: 714 - DNA, 26 bp, Homo sapiens
cagggtcagggatcaggtggaagctg

SEQ ID NO: 715 - DNA, 26 bp, Homo sapiens
agggtcagggatcaggtggaagctgg

SEQ ID NO: 716 - DNA, 26 bp, Homo sapiens
gggtcagggatcaggtggaagctggc

SEQ ID NO: 717 - DNA, 26 bp, Homo sapiens
ggtcagggatcaggtggaagctggca

SEQ ID NO: 718 - DNA, 26 bp, Homo sapiens
gtcagggatcaggtggaagctggcag

SEQ ID NO: 719 - DNA, 26 bp, Homo sapiens
tcagggatcaggtggaagctggcagt

SEQ ID NO: 720 - DNA, 26 bp, Homo sapiens
cagggatcaggtggaagctggcagtt

SEQ ID NO: 721 - DNA, 26 bp, Homo sapiens
agggatcaggtggaagctggcagttt

SEQ ID NO: 722 - DNA, 26 bp, Homo sapiens
gggatcaggtggaagctggcagtttc

SEQ ID NO: 723 - DNA, 26 bp, Homo sapiens
ggatcaggtggaagctggcagtttca

SEQ ID NO: 724 - DNA, 26 bp, Homo sapiens
gatcaggtggaagctggcagtttcaa

SEQ ID NO: 725 - DNA, 26 bp, Homo sapiens
atcaggtggaagctggcagtttcaat

SEQ ID NO: 726 - DNA, 26 bp, Homo sapiens
tcaggtggaagctggcagtttcaatc

SEQ ID NO: 727 - DNA, 26 bp, Homo sapiens
caggtggaagctggcagtttcaatct

SEQ ID NO: 728 - DNA, 26 bp, Homo sapiens
aggtggaagctggcagtttcaatcta

SEQ ID NO: 729 - DNA, 26 bp, Homo sapiens
ggtggaagctggcagtttcaatctat

SEQ ID NO: 730 - DNA, 26 bp, Homo sapiens
gtggaagctggcagtttcaatctatc

SEQ ID NO: 731 - DNA, 26 bp, Homo sapiens
tggaagctggcagtttcaatctatcc

SEQ ID NO: 732 - DNA, 26 bp, Homo sapiens
ggaagctggcagtttcaatctatcct

SEQ ID NO: 733 - DNA, 26 bp, Homo sapiens
gaagctggcagtttcaatctatcctg

SEQ ID NO: 734 - DNA, 26 bp, Homo sapiens
aagctggcagtttcaatctatcctgt

SEQ ID NO: 735 - DNA, 26 bp, Homo sapiens
agctggcagtttcaatctatcctgtg

SEQ ID NO: 736 - DNA, 26 bp, Homo sapiens
gctggcagtttcaatctatcctgtgg

SEQ ID NO: 737 - DNA, 26 bp, Homo sapiens
ctggcagtttcaatctatcctgtgga

SEQ ID NO: 738 - DNA, 26 bp, Homo sapiens
tggcagtttcaatctatcctgtggat

SEQ ID NO: 739 - DNA, 26 bp, Homo sapiens
ggcagtttcaatctatcctgtggata

SEQ ID NO: 740 - DNA, 26 bp, Homo sapiens
gcagtttcaatctatcctgtggatag

SEQ ID NO: 741 - DNA, 26 bp, Homo sapiens
cagtttcaatctatcctgtggataga

SEQ ID NO: 742 - DNA, 26 bp, Homo sapiens
agtttcaatctatcctgtggatagag

SEQ ID NO: 743 - DNA, 26 bp, Homo sapiens
gtttcaatctatcctgtggatagagt

SEQ ID NO: 744 - DNA, 26 bp, Homo sapiens
tttcaatctatcctgtggatagagtg

SEQ ID NO: 745 - DNA, 26 bp, Homo sapiens
ttcaatctatcctgtggatagagtgt

SEQ ID NO: 746 - DNA, 26 bp, Homo sapiens
tcaatctatcctgtggatagagtgtg

SEQ ID NO: 747 - DNA, 26 bp, Homo sapiens
caatctatcctgtggatagagtgtga

SEQ ID NO: 748 - DNA, 26 bp, Homo sapiens
aatctatcctgtggatagagtgtgaa

SEQ ID NO: 749 - DNA, 26 bp, Homo sapiens
atctatcctgtggatagagtgtgaaa

SEQ ID NO: 750 - DNA, 26 bp, Homo sapiens
tctatcctgtggatagagtgtgaaag

SEQ ID NO: 751 - DNA, 26 bp, Homo sapiens
ctatcctgtggatagagtgtgaaagc

SEQ ID NO: 752 - DNA, 26 bp, Homo sapiens
tatcctgtggatagagtgtgaaagca

SEQ ID NO: 753 - DNA, 26 bp, Homo sapiens
atcctgtggatagagtgtgaaagcaa

SEQ ID NO: 754 - DNA, 26 bp, Homo sapiens
tcctgtggatagagtgtgaaagcaac

SEQ ID NO: 755 - DNA, 26 bp, Homo sapiens
cctgtggatagagtgtgaaagcaaca

SEQ ID NO: 756 - DNA, 26 bp, Homo sapiens
ctgtggatagagtgtgaaagcaacaa

SEQ ID NO: 757 - DNA, 26 bp, Homo sapiens
tgtggatagagtgtgaaagcaacaaa

SEQ ID NO: 758 - DNA, 26 bp, Homo sapiens
gtggatagagtgtgaaagcaacaaaa

SEQ ID NO: 759 - DNA, 26 bp, Homo sapiens
tggatagagtgtgaaagcaacaaaac

SEQ ID NO: 760 - DNA, 26 bp, Homo sapiens
ggatagagtgtgaaagcaacaaaacc

SEQ ID NO: 761 - DNA, 26 bp, Homo sapiens
gatagagtgtgaaagcaacaaaaccc

SEQ ID NO: 762 - DNA, 26 bp, Homo sapiens
atagagtgtgaaagcaacaaaaccca

SEQ ID NO: 763 - DNA, 26 bp, Homo sapiens
tagagtgtgaaagcaacaaaacccac

SEQ ID NO: 764 - DNA, 26 bp, Homo sapiens
agagtgtgaaagcaacaaaacccacc

SEQ ID NO: 765 - DNA, 26 bp, Homo sapiens
gagtgtgaaagcaacaaaacccacca

SEQ ID NO: 766 - DNA, 26 bp, Homo sapiens
agtgtgaaagcaacaaaacccaccac

SEQ ID NO: 767 - DNA, 26 bp, Homo sapiens
gtgtgaaagcaacaaaacccaccacc

SEQ ID NO: 768 - DNA, 26 bp, Homo sapiens
tgtgaaagcaacaaaacccaccaccg

SEQ ID NO: 769 - DNA, 26 bp, Homo sapiens
gtgaaagcaacaaaacccaccaccgt

SEQ ID NO: 770 - DNA, 26 bp, Homo sapiens
tgaaagcaacaaaacccaccaccgtt

SEQ ID NO: 771 - DNA, 26 bp, Homo sapiens
gaaagcaacaaaacccaccaccgtta

SEQ ID NO: 772 - DNA, 26 bp, Homo sapiens
aaagcaacaaaacccaccaccgttaa

SEQ ID NO: 773 - DNA, 26 bp, Homo sapiens
aagcaacaaaacccaccaccgttaat

SEQ ID NO: 774 - DNA, 26 bp, Homo sapiens
agcaacaaaacccaccaccgttaata

SEQ ID NO: 775 - DNA, 26 bp, Homo sapiens
gcaacaaaacccaccaccgttaatac

SEQ ID NO: 776 - DNA, 26 bp, Homo sapiens
caacaaaacccaccaccgttaatacc

SEQ ID NO: 777 - DNA, 26 bp, Homo sapiens
aacaaaacccaccaccgttaatacca

SEQ ID NO: 778 - DNA, 26 bp, Homo sapiens
acaaaacccaccaccgttaataccaa

SEQ ID NO: 779 - DNA, 26 bp, Homo sapiens
caaaacccaccaccgttaataccaac

SEQ ID NO: 780 - DNA, 26 bp, Homo sapiens
aaaacccaccaccgttaataccaaca

SEQ ID NO: 781 - DNA, 26 bp, Homo sapiens
aaacccaccaccgttaataccaacat

SEQ ID NO: 782 - DNA, 26 bp, Homo sapiens
aacccaccaccgttaataccaacata

SEQ ID NO: 783 - DNA, 26 bp, Homo sapiens
acccaccaccgttaataccaacatag

SEQ ID NO: 784 - DNA, 26 bp, Homo sapiens
cccaccaccgttaataccaacatagg

SEQ ID NO: 785 - DNA, 26 bp, Homo sapiens
ccaccaccgttaataccaacatagga

SEQ ID NO: 786 - DNA, 26 bp, Homo sapiens
caccaccgttaataccaacataggag

SEQ ID NO: 787 - DNA, 26 bp, Homo sapiens
accaccgttaataccaacataggagc

SEQ ID NO: 788 - DNA, 26 bp, Homo sapiens
ccaccgttaataccaacataggagct

SEQ ID NO: 789 - DNA, 26 bp, Homo sapiens
caccgttaataccaacataggagctg

SEQ ID NO: 790 - DNA, 26 bp, Homo sapiens
accgttaataccaacataggagctga

SEQ ID NO: 791 - DNA, 26 bp, Homo sapiens
ccgttaataccaacataggagctgag

SEQ ID NO: 792 - DNA, 26 bp, Homo sapiens
cgttaataccaacataggagctgagc

SEQ ID NO: 793 - DNA, 26 bp, Homo sapiens
gttaataccaacataggagctgagct

SEQ ID NO: 794 - DNA, 26 bp, Homo sapiens
ttaataccaacataggagctgagctt

SEQ ID NO: 795 - DNA, 26 bp, Homo sapiens
taataccaacataggagctgagcttt

SEQ ID NO: 796 - DNA, 26 bp, Homo sapiens
aataccaacataggagctgagctttt

SEQ ID NO: 797 - DNA, 26 bp, Homo sapiens
ataccaacataggagctgagctttta

SEQ ID NO: 798 - DNA, 26 bp, Homo sapiens
taccaacataggagctgagcttttaa

SEQ ID NO: 799 - DNA, 26 bp, Homo sapiens
accaacataggagctgagcttttaat

SEQ ID NO: 800 - DNA, 26 bp, Homo sapiens
ccaacataggagctgagcttttaatg

SEQ ID NO: 801 - DNA, 26 bp, Homo sapiens
caacataggagctgagcttttaatgg

SEQ ID NO: 802 - DNA, 26 bp, Homo sapiens
aacataggagctgagcttttaatggc

SEQ ID NO: 803 - DNA, 26 bp, Homo sapiens
acataggagctgagcttttaatggcc

SEQ ID NO: 804 - DNA, 26 bp, Homo sapiens
cataggagctgagcttttaatggccc

SEQ ID NO: 805 - DNA, 26 bp, Homo sapiens
ataggagctgagcttttaatggccca

SEQ ID NO: 806 - DNA, 26 bp, Homo sapiens
taggagctgagcttttaatggcccaa

SEQ ID NO: 807 - DNA, 26 bp, Homo sapiens
aggagctgagcttttaatggcccaat

SEQ ID NO: 808 - DNA, 26 bp, Homo sapiens
ggagctgagcttttaatggcccaatt

SEQ ID NO: 809 - DNA, 26 bp, Homo sapiens
gagctgagcttttaatggcccaattt

SEQ ID NO: 810 - DNA, 26 bp, Homo sapiens
agctgagcttttaatggcccaatttg

SEQ ID NO: 811 - DNA, 26 bp, Homo sapiens
gctgagcttttaatggcccaatttgc

SEQ ID NO: 812 - DNA, 26 bp, Homo sapiens
ctgagcttttaatggcccaatttgcc

SEQ ID NO: 813 - DNA, 26 bp, Homo sapiens
tgagcttttaatggcccaatttgcct

SEQ ID NO: 814 - DNA, 26 bp, Homo sapiens
gagcttttaatggcccaatttgcctt

SEQ ID NO: 815 - DNA, 26 bp, Homo sapiens
agcttttaatggcccaatttgcctta

SEQ ID NO: 816 - DNA, 26 bp, Homo sapiens
gcttttaatggcccaatttgccttag

SEQ ID NO: 817 - DNA, 26 bp, Homo sapiens
cttttaatggcccaatttgccttagt

SEQ ID NO: 818 - DNA, 26 bp, Homo sapiens
ttttaatggcccaatttgccttagtc

SEQ ID NO: 819 - DNA, 26 bp, Homo sapiens
tttaatggcccaatttgccttagtct

SEQ ID NO: 820 - DNA, 26 bp, Homo sapiens
ttaatggcccaatttgccttagtctc

SEQ ID NO: 821 - DNA, 26 bp, Homo sapiens
taatggcccaatttgccttagtctcc

SEQ ID NO: 822 - DNA, 26 bp, Homo sapiens
aatggcccaatttgccttagtctcca

SEQ ID NO: 823 - DNA, 26 bp, Homo sapiens
atggcccaatttgccttagtctccag

SEQ ID NO: 824 - DNA, 26 bp, Homo sapiens
tggcccaatttgccttagtctccagg

SEQ ID NO: 825 - DNA, 26 bp, Homo sapiens
ggcccaatttgccttagtctccaggc

SEQ ID NO: 826 - DNA, 26 bp, Homo sapiens
gcccaatttgccttagtctccaggca

SEQ ID NO: 827 - DNA, 26 bp, Homo sapiens
cccaatttgccttagtctccaggcag

SEQ ID NO: 828 - DNA, 26 bp, Homo sapiens
ccaatttgccttagtctccaggcaga

SEQ ID NO: 829 - DNA, 26 bp, Homo sapiens
caatttgccttagtctccaggcagag

SEQ ID NO: 830 - DNA, 26 bp, Homo sapiens
aatttgccttagtctccaggcagagc

SEQ ID NO: 831 - DNA, 26 bp, Homo sapiens
atttgccttagtctccaggcagagct

SEQ ID NO: 832 - DNA, 26 bp, Homo sapiens
tttgccttagtctccaggcagagctg

SEQ ID NO: 833 - DNA, 26 bp, Homo sapiens
ttgccttagtctccaggcagagctgg

SEQ ID NO: 834 - DNA, 26 bp, Homo sapiens
tgccttagtctccaggcagagctggg

SEQ ID NO: 835 - DNA, 26 bp, Homo sapiens
gccttagtctccaggcagagctgggt

SEQ ID NO: 836 - DNA, 26 bp, Homo sapiens
ccttagtctccaggcagagctgggta

SEQ ID NO: 837 - DNA, 26 bp, Homo sapiens
cttagtctccaggcagagctgggtaa

SEQ ID NO: 838 - DNA, 26 bp, Homo sapiens
ttagtctccaggcagagctgggtaaa

SEQ ID NO: 839 - DNA, 26 bp, Homo sapiens
tagtctccaggcagagctgggtaaag

SEQ ID NO: 840 - DNA, 26 bp, Homo sapiens
agtctccaggcagagctgggtaaagc

SEQ ID NO: 841 - DNA, 26 bp, Homo sapiens
gtctccaggcagagctgggtaaagct

SEQ ID NO: 842 - DNA, 26 bp, Homo sapiens
tctccaggcagagctgggtaaagcta

SEQ ID NO: 843 - DNA, 26 bp, Homo sapiens
ctccaggcagagctgggtaaagctag

SEQ ID NO: 844 - DNA, 26 bp, Homo sapiens
tccaggcagagctgggtaaagctaga

SEQ ID NO: 845 - DNA, 26 bp, Homo sapiens
ccaggcagagctgggtaaagctagag

SEQ ID NO: 846 - DNA, 26 bp, Homo sapiens
caggcagagctgggtaaagctagagc

SEQ ID NO: 847 - DNA, 26 bp, Homo sapiens
aggcagagctgggtaaagctagagct

SEQ ID NO: 848 - DNA, 26 bp, Homo sapiens
ggcagagctgggtaaagctagagctt

SEQ ID NO: 849 - DNA, 26 bp, Homo sapiens
gcagagctgggtaaagctagagcttc

SEQ ID NO: 850 - DNA, 26 bp, Homo sapiens
cagagctgggtaaagctagagcttct

SEQ ID NO: 851 - DNA, 26 bp, Homo sapiens
agagctgggtaaagctagagcttctg

SEQ ID NO: 852 - DNA, 26 bp, Homo sapiens
gagctgggtaaagctagagcttctgg

SEQ ID NO: 853 - DNA, 26 bp, Homo sapiens
agctgggtaaagctagagcttctggc

SEQ ID NO: 854 - DNA, 26 bp, Homo sapiens
gctgggtaaagctagagcttctggct

SEQ ID NO: 855 - DNA, 26 bp, Homo sapiens
ctgggtaaagctagagcttctggctt

SEQ ID NO: 856 - DNA, 26 bp, Homo sapiens
tgggtaaagctagagcttctggcttt

SEQ ID NO: 857 - DNA, 26 bp, Homo sapiens
gggtaaagctagagcttctggctttg

SEQ ID NO: 858 - DNA, 26 bp, Homo sapiens
ggtaaagctagagcttctggctttgc

SEQ ID NO: 859 - DNA, 26 bp, Homo sapiens
gtaaagctagagcttctggctttgct

SEQ ID NO: 860 - DNA, 26 bp, Homo sapiens
taaagctagagcttctggctttgctt

SEQ ID NO: 861 - DNA, 26 bp, Homo sapiens
aaagctagagcttctggctttgctta

SEQ ID NO: 862 - DNA, 26 bp, Homo sapiens
aagctagagcttctggctttgcttat

SEQ ID NO: 863 - DNA, 26 bp, Homo sapiens
agctagagcttctggctttgcttata

SEQ ID NO: 864 - DNA, 26 bp, Homo sapiens
gctagagcttctggctttgcttatat

SEQ ID NO: 865 - DNA, 26 bp, Homo sapiens
ctagagcttctggctttgcttatatg

SEQ ID NO: 866 - DNA, 26 bp, Homo sapiens
tagagcttctggctttgcttatatgg

SEQ ID NO: 867 - DNA, 26 bp, Homo sapiens
agagcttctggctttgcttatatgga

SEQ ID NO: 868 - DNA, 26 bp, Homo sapiens
gagcttctggctttgcttatatggag

SEQ ID NO: 869 - DNA, 26 bp, Homo sapiens
agcttctggctttgcttatatggaga

SEQ ID NO: 870 - DNA, 26 bp, Homo sapiens
gcttctggctttgcttatatggagaa

SEQ ID NO: 871 - DNA, 26 bp, Homo sapiens
cttctggctttgcttatatggagaag

SEQ ID NO: 872 - DNA, 26 bp, Homo sapiens
ttctggctttgcttatatggagaagg

SEQ ID NO: 873 - DNA, 26 bp, Homo sapiens
tctggctttgcttatatggagaaggg

SEQ ID NO: 874 - DNA, 26 bp, Homo sapiens
ctggctttgcttatatggagaagggg

SEQ ID NO: 875 - DNA, 26 bp, Homo sapiens
tggctttgcttatatggagaaggggg

SEQ ID NO: 876 - DNA, 26 bp, Homo sapiens
ggctttgcttatatggagaaggggga

SEQ ID NO: 877 - DNA, 26 bp, Homo sapiens
gctttgcttatatggagaagggggag

SEQ ID NO: 878 - DNA, 26 bp, Homo sapiens
ctttgcttatatggagaagggggagc

SEQ ID NO: 879 - DNA, 26 bp, Homo sapiens
tttgcttatatggagaagggggagca

SEQ ID NO: 880 - DNA, 26 bp, Homo sapiens
ttgcttatatggagaagggggagcag

SEQ ID NO: 881 - DNA, 26 bp, Homo sapiens
tgcttatatggagaagggggagcagt

SEQ ID NO: 882 - DNA, 26 bp, Homo sapiens
gcttatatggagaagggggagcagtt

SEQ ID NO: 883 - DNA, 26 bp, Homo sapiens
cttatatggagaagggggagcagtta

SEQ ID NO: 884 - DNA, 26 bp, Homo sapiens
ttatatggagaagggggagcagttac

SEQ ID NO: 885 - DNA, 26 bp, Homo sapiens
tatatggagaagggggagcagttact

SEQ ID NO: 886 - DNA, 26 bp, Homo sapiens
atatggagaagggggagcagttactg

SEQ ID NO: 887 - DNA, 26 bp, Homo sapiens
tatggagaagggggagcagttactga

SEQ ID NO: 888 - DNA, 26 bp, Homo sapiens
atggagaagggggagcagttactgag

SEQ ID NO: 889 - DNA, 26 bp, Homo sapiens
tggagaagggggagcagttactgagg

SEQ ID NO: 890 - DNA, 26 bp, Homo sapiens
ggagaagggggagcagttactgaggc

SEQ ID NO: 891 - DNA, 26 bp, Homo sapiens
gagaagggggagcagttactgaggca

SEQ ID NO: 892 - DNA, 26 bp, Homo sapiens
agaagggggagcagttactgaggcag

SEQ ID NO: 893 - DNA, 26 bp, Homo sapiens
gaagggggagcagttactgaggcagc

SEQ ID NO: 894 - DNA, 26 bp, Homo sapiens
aagggggagcagttactgaggcagct

SEQ ID NO: 895 - DNA, 26 bp, Homo sapiens
agggggagcagttactgaggcagctt

SEQ ID NO: 896 - DNA, 26 bp, Homo sapiens
gggggagcagttactgaggcagctta

SEQ ID NO: 897 - DNA, 26 bp, Homo sapiens
ggggagcagttactgaggcagcttaa

SEQ ID NO: 898 - DNA, 26 bp, Homo sapiens
gggagcagttactgaggcagcttaat

SEQ ID NO: 899 - DNA, 26 bp, Homo sapiens
ggagcagttactgaggcagcttaatt

SEQ ID NO: 900 - DNA, 26 bp, Homo sapiens
gagcagttactgaggcagcttaattc

SEQ ID NO: 901 - DNA, 26 bp, Homo sapiens
agcagttactgaggcagcttaattct

SEQ ID NO: 902 - DNA, 26 bp, Homo sapiens
gcagttactgaggcagcttaattctg

SEQ ID NO: 903 - DNA, 26 bp, Homo sapiens
cagttactgaggcagcttaattctga

SEQ ID NO: 904 - DNA, 26 bp, Homo sapiens
agttactgaggcagcttaattctgac

SEQ ID NO: 905 - DNA, 26 bp, Homo sapiens
gttactgaggcagcttaattctgaca

SEQ ID NO: 906 - DNA, 26 bp, Homo sapiens
ttactgaggcagcttaattctgacac

SEQ ID NO: 907 - DNA, 26 bp, Homo sapiens
tactgaggcagcttaattctgacacc

SEQ ID NO: 908 - DNA, 26 bp, Homo sapiens
actgaggcagcttaattctgacacct

SEQ ID NO: 909 - DNA, 26 bp, Homo sapiens
ctgaggcagcttaattctgacacctc

SEQ ID NO: 910 - DNA, 26 bp, Homo sapiens
tgaggcagcttaattctgacacctca

SEQ ID NO: 911 - DNA, 26 bp, Homo sapiens
gaggcagcttaattctgacacctcag

SEQ ID NO: 912 - DNA, 26 bp, Homo sapiens
aggcagcttaattctgacacctcaga

SEQ ID NO: 913 - DNA, 26 bp, Homo sapiens
ggcagcttaattctgacacctcagag

SEQ ID NO: 914 - DNA, 26 bp, Homo sapiens
gcagcttaattctgacacctcagaga

SEQ ID NO: 915 - DNA, 26 bp, Homo sapiens
cagcttaattctgacacctcagagat

SEQ ID NO: 916 - DNA, 26 bp, Homo sapiens
agcttaattctgacacctcagagatg

SEQ ID NO: 917 - DNA, 26 bp, Homo sapiens
gcttaattctgacacctcagagatgt

SEQ ID NO: 918 - DNA, 26 bp, Homo sapiens
cttaattctgacacctcagagatgtg

SEQ ID NO: 919 - DNA, 26 bp, Homo sapiens
ttaattctgacacctcagagatgtgg

SEQ ID NO: 920 - DNA, 26 bp, Homo sapiens
taattctgacacctcagagatgtggc

SEQ ID NO: 921 - DNA, 26 bp, Homo sapiens
aattctgacacctcagagatgtggcc

SEQ ID NO: 922 - DNA, 26 bp, Homo sapiens
attctgacacctcagagatgtggcca

SEQ ID NO: 923 - DNA, 26 bp, Homo sapiens
ttctgacacctcagagatgtggccag

SEQ ID NO: 924 - DNA, 26 bp, Homo sapiens
tctgacacctcagagatgtggccagc

SEQ ID NO: 925 - DNA, 26 bp, Homo sapiens
ctgacacctcagagatgtggccagct

SEQ ID NO: 926 - DNA, 26 bp, Homo sapiens
tgacacctcagagatgtggccagctt

SEQ ID NO: 927 - DNA, 26 bp, Homo sapiens
gacacctcagagatgtggccagcttt

SEQ ID NO: 928 - DNA, 26 bp, Homo sapiens
acacctcagagatgtggccagctttt

SEQ ID NO: 929 - DNA, 26 bp, Homo sapiens
cacctcagagatgtggccagcttttt

SEQ ID NO: 930 - DNA, 26 bp, Homo sapiens
acctcagagatgtggccagctttttg

SEQ ID NO: 931 - DNA, 26 bp, Homo sapiens
cctcagagatgtggccagctttttgg

SEQ ID NO: 932 - DNA, 26 bp, Homo sapiens
ctcagagatgtggccagctttttgga

SEQ ID NO: 933 - DNA, 26 bp, Homo sapiens
tcagagatgtggccagctttttggag

SEQ ID NO: 934 - DNA, 26 bp, Homo sapiens
cagagatgtggccagctttttggagc

SEQ ID NO: 935 - DNA, 26 bp, Homo sapiens
agagatgtggccagctttttggagca

SEQ ID NO: 936 - DNA, 26 bp, Homo sapiens
gagatgtggccagctttttggagcag

SEQ ID NO: 937 - DNA, 26 bp, Homo sapiens
agatgtggccagctttttggagcaga

SEQ ID NO: 938 - DNA, 26 bp, Homo sapiens
gatgtggccagctttttggagcagat

SEQ ID NO: 939 - DNA, 26 bp, Homo sapiens
atgtggccagctttttggagcagatt

SEQ ID NO: 940 - DNA, 26 bp, Homo sapiens
tgtggccagctttttggagcagattc

SEQ ID NO: 941 - DNA, 26 bp, Homo sapiens
gtggccagctttttggagcagattct

SEQ ID NO: 942 - DNA, 26 bp, Homo sapiens
tggccagctttttggagcagattctc

SEQ ID NO: 943 - DNA, 26 bp, Homo sapiens
ggccagctttttggagcagattctcc

SEQ ID NO: 944 - DNA, 26 bp, Homo sapiens
gccagctttttggagcagattctcca

SEQ ID NO: 945 - DNA, 26 bp, Homo sapiens
ccagctttttggagcagattctccag

SEQ ID NO: 946 - DNA, 26 bp, Homo sapiens
cagctttttggagcagattctccaga

SEQ ID NO: 947 - DNA, 26 bp, Homo sapiens
agctttttggagcagattctccagaa

SEQ ID NO: 948 - DNA, 26 bp, Homo sapiens
gctttttggagcagattctccagaat

SEQ ID NO: 949 - DNA, 26 bp, Homo sapiens
ctttttggagcagattctccagaatg

SEQ ID NO: 950 - DNA, 26 bp, Homo sapiens
tttttggagcagattctccagaatgg

SEQ ID NO: 951 - DNA, 26 bp, Homo sapiens
ttttggagcagattctccagaatgga

SEQ ID NO: 952 - DNA, 26 bp, Homo sapiens
tttggagcagattctccagaatggag

SEQ ID NO: 953 - DNA, 26 bp, Homo sapiens
ttggagcagattctccagaatggaga

SEQ ID NO: 954 - DNA, 26 bp, Homo sapiens
tggagcagattctccagaatggagaa

SEQ ID NO: 955 - DNA, 26 bp, Homo sapiens
ggagcagattctccagaatggagaat

SEQ ID NO: 956 - DNA, 26 bp, Homo sapiens
gagcagattctccagaatggagaatg

SEQ ID NO: 957 - DNA, 26 bp, Homo sapiens
agcagattctccagaatggagaatgg

SEQ ID NO: 958 - DNA, 26 bp, Homo sapiens
gcagattctccagaatggagaatgga

SEQ ID NO: 959 - DNA, 26 bp, Homo sapiens
cagattctccagaatggagaatggac

SEQ ID NO: 960 - DNA, 26 bp, Homo sapiens
agattctccagaatggagaatggact

SEQ ID NO: 961 - DNA, 26 bp, Homo sapiens
gattctccagaatggagaatggacta

SEQ ID NO: 962 - DNA, 26 bp, Homo sapiens
attctccagaatggagaatggactag

SEQ ID NO: 963 - DNA, 26 bp, Homo sapiens
ttctccagaatggagaatggactagc

SEQ ID NO: 964 - DNA, 26 bp, Homo sapiens
tctccagaatggagaatggactagca

SEQ ID NO: 965 - DNA, 26 bp, Homo sapiens
ctccagaatggagaatggactagcaa

SEQ ID NO: 966 - DNA, 26 bp, Homo sapiens
tccagaatggagaatggactagcaac

SEQ ID NO: 967 - DNA, 26 bp, Homo sapiens
ccagaatggagaatggactagcaact

SEQ ID NO: 968 - DNA, 26 bp, Homo sapiens
cagaatggagaatggactagcaactg

SEQ ID NO: 969 - DNA, 26 bp, Homo sapiens
agaatggagaatggactagcaactgc

SEQ ID NO: 970 - DNA, 26 bp, Homo sapiens
gaatggagaatggactagcaactgct

SEQ ID NO: 971 - DNA, 26 bp, Homo sapiens
aatggagaatggactagcaactgctg

SEQ ID NO: 972 - DNA, 26 bp, Homo sapiens
atggagaatggactagcaactgctga

SEQ ID NO: 973 - DNA, 26 bp, Homo sapiens
tggagaatggactagcaactgctgaa

SEQ ID NO: 974 - DNA, 26 bp, Homo sapiens
ggagaatggactagcaactgctgaag

SEQ ID NO: 975 - DNA, 26 bp, Homo sapiens
gagaatggactagcaactgctgaaga

SEQ ID NO: 976 - DNA, 26 bp, Homo sapiens
agaatggactagcaactgctgaagat

SEQ ID NO: 977 - DNA, 26 bp, Homo sapiens
gaatggactagcaactgctgaagatg

SEQ ID NO: 978 - DNA, 26 bp, Homo sapiens
aatggactagcaactgctgaagatgg

SEQ ID NO: 979 - DNA, 26 bp, Homo sapiens
atggactagcaactgctgaagatggg

SEQ ID NO: 980 - DNA, 26 bp, Homo sapiens
tggactagcaactgctgaagatgggc

SEQ ID NO: 981 - DNA, 26 bp, Homo sapiens
ggactagcaactgctgaagatgggct

SEQ ID NO: 982 - DNA, 26 bp, Homo sapiens
gactagcaactgctgaagatgggctt

SEQ ID NO: 983 - DNA, 26 bp, Homo sapiens
actagcaactgctgaagatgggcttg

SEQ ID NO: 984 - DNA, 26 bp, Homo sapiens
ctagcaactgctgaagatgggcttgt

SEQ ID NO: 985 - DNA, 26 bp, Homo sapiens
tagcaactgctgaagatgggcttgtc

SEQ ID NO: 986 - DNA, 26 bp, Homo sapiens
agcaactgctgaagatgggcttgtct

SEQ ID NO: 987 - DNA, 26 bp, Homo sapiens
gcaactgctgaagatgggcttgtctg

SEQ ID NO: 988 - DNA, 26 bp, Homo sapiens
caactgctgaagatgggcttgtctgg

SEQ ID NO: 989 - DNA, 26 bp, Homo sapiens
aactgctgaagatgggcttgtctggc

SEQ ID NO: 990 - DNA, 26 bp, Homo sapiens
actgctgaagatgggcttgtctggca

SEQ ID NO: 991 - DNA, 26 bp, Homo sapiens
ctgctgaagatgggcttgtctggcaa

SEQ ID NO: 992 - DNA, 26 bp, Homo sapiens
tgctgaagatgggcttgtctggcaag

SEQ ID NO: 993 - DNA, 26 bp, Homo sapiens
gctgaagatgggcttgtctggcaagg

SEQ ID NO: 994 - DNA, 26 bp, Homo sapiens
ctgaagatgggcttgtctggcaaggg

SEQ ID NO: 995 - DNA, 26 bp, Homo sapiens
tgaagatgggcttgtctggcaaggga

SEQ ID NO: 996 - DNA, 26 bp, Homo sapiens
gaagatgggcttgtctggcaagggaa

SEQ ID NO: 997 - DNA, 26 bp, Homo sapiens
aagatgggcttgtctggcaagggaaa

SEQ ID NO: 998 - DNA, 26 bp, Homo sapiens
agatgggcttgtctggcaagggaaac

SEQ ID NO: 999 - DNA, 26 bp, Homo sapiens
gatgggcttgtctggcaagggaaact

SEQ ID NO: 1000 - DNA, 26 bp, Homo sapiens
atgggcttgtctggcaagggaaactg

SEQ ID NO: 1001 - DNA, 26 bp, Homo sapiens
tgggcttgtctggcaagggaaactgg

SEQ ID NO: 1002 - DNA, 26 bp, Homo sapiens
gggcttgtctggcaagggaaactgga

SEQ ID NO: 1003 - DNA, 26 bp, Homo sapiens
ggcttgtctggcaagggaaactggaa

SEQ ID NO: 1004 - DNA, 26 bp, Homo sapiens
gcttgtctggcaagggaaactggaaa

SEQ ID NO: 1005 - DNA, 26 bp, Homo sapiens
cttgtctggcaagggaaactggaaac

SEQ ID NO: 1006 - DNA, 26 bp, Homo sapiens
ttgtctggcaagggaaactggaaact

SEQ ID NO: 1007 - DNA, 26 bp, Homo sapiens
tgtctggcaagggaaactggaaactg

SEQ ID NO: 1008 - DNA, 26 bp, Homo sapiens
gtctggcaagggaaactggaaactgg

SEQ ID NO: 1009 - DNA, 26 bp, Homo sapiens
tctggcaagggaaactggaaactggg

SEQ ID NO: 1010 - DNA, 26 bp, Homo sapiens
ctggcaagggaaactggaaactgggg

SEQ ID NO: 1011 - DNA, 26 bp, Homo sapiens
tggcaagggaaactggaaactggggc

SEQ ID NO: 1012 - DNA, 26 bp, Homo sapiens
ggcaagggaaactggaaactggggcc

SEQ ID NO: 1013 - DNA, 26 bp, Homo sapiens
gcaagggaaactggaaactggggccc

SEQ ID NO: 1014 - DNA, 26 bp, Homo sapiens
caagggaaactggaaactggggccca

SEQ ID NO: 1015 - DNA, 26 bp, Homo sapiens
aagggaaactggaaactggggcccat

SEQ ID NO: 1016 - DNA, 26 bp, Homo sapiens
agggaaactggaaactggggcccatg

SEQ ID NO: 1017 - DNA, 26 bp, Homo sapiens
gggaaactggaaactggggcccatga

SEQ ID NO: 1018 - DNA, 26 bp, Homo sapiens
ggaaactggaaactggggcccatgaa

SEQ ID NO: 1019 - DNA, 26 bp, Homo sapiens
gaaactggaaactggggcccatgaac

SEQ ID NO: 1020 - DNA, 26 bp, Homo sapiens
aaactggaaactggggcccatgaaca

SEQ ID NO: 1021 - DNA, 26 bp, Homo sapiens
aactggaaactggggcccatgaacat

SEQ ID NO: 1022 - DNA, 26 bp, Homo sapiens
actggaaactggggcccatgaacatc

SEQ ID NO: 1023 - DNA, 26 bp, Homo sapiens
ctggaaactggggcccatgaacatcc

SEQ ID NO: 1024 - DNA, 26 bp, Homo sapiens
tggaaactggggcccatgaacatccc

SEQ ID NO: 1025 - DNA, 26 bp, Homo sapiens
ggaaactggggcccatgaacatcccc

SEQ ID NO: 1026 - DNA, 26 bp, Homo sapiens
gaaactggggcccatgaacatcccca

SEQ ID NO: 1027 - DNA, 26 bp, Homo sapiens
aaactggggcccatgaacatccccaa

SEQ ID NO: 1028 - DNA, 26 bp, Homo sapiens
aactggggcccatgaacatccccaag

SEQ ID NO: 1029 - DNA, 26 bp, Homo sapiens
actggggcccatgaacatccccaagg

SEQ ID NO: 1030 - DNA, 26 bp, Homo sapiens
ctggggcccatgaacatccccaagga

SEQ ID NO: 1031 - DNA, 26 bp, Homo sapiens
tggggcccatgaacatccccaaggaa

SEQ ID NO: 1032 - DNA, 26 bp, Homo sapiens
ggggcccatgaacatccccaaggaag

SEQ ID NO: 1033 - DNA, 26 bp, Homo sapiens
gggcccatgaacatccccaaggaagg

SEQ ID NO: 1034 - DNA, 26 bp, Homo sapiens
ggcccatgaacatccccaaggaaggt

SEQ ID NO: 1035 - DNA, 26 bp, Homo sapiens
gcccatgaacatccccaaggaaggta

SEQ ID NO: 1036 - DNA, 26 bp, Homo sapiens
cccatgaacatccccaaggaaggtag

SEQ ID NO: 1037 - DNA, 26 bp, Homo sapiens
ccatgaacatccccaaggaaggtagg

SEQ ID NO: 1038 - DNA, 26 bp, Homo sapiens
catgaacatccccaaggaaggtaggc

SEQ ID NO: 1039 - DNA, 26 bp, Homo sapiens
atgaacatccccaaggaaggtaggcc

SEQ ID NO: 1040 - DNA, 26 bp, Homo sapiens
tgaacatccccaaggaaggtaggccc

SEQ ID NO: 1041 - DNA, 26 bp, Homo sapiens
gaacatccccaaggaaggtaggccca

SEQ ID NO: 1042 - DNA, 26 bp, Homo sapiens
aacatccccaaggaaggtaggcccag

SEQ ID NO: 1043 - DNA, 26 bp, Homo sapiens
acatccccaaggaaggtaggcccagt

SEQ ID NO: 1044 - DNA, 26 bp, Homo sapiens
catccccaaggaaggtaggcccagtg

SEQ ID NO: 1045 - DNA, 26 bp, Homo sapiens
atccccaaggaaggtaggcccagtgg

SEQ ID NO: 1046 - DNA, 26 bp, Homo sapiens
tccccaaggaaggtaggcccagtgga

SEQ ID NO: 1047 - DNA, 26 bp, Homo sapiens
ccccaaggaaggtaggcccagtggaa

SEQ ID NO: 1048 - DNA, 26 bp, Homo sapiens
cccaaggaaggtaggcccagtggaat

SEQ ID NO: 1049 - DNA, 26 bp, Homo sapiens
ccaaggaaggtaggcccagtggaatt

SEQ ID NO: 1050 - DNA, 26 bp, Homo sapiens
caaggaaggtaggcccagtggaattt

SEQ ID NO: 1051 - DNA, 26 bp, Homo sapiens
aaggaaggtaggcccagtggaatttc

SEQ ID NO: 1052 - DNA, 26 bp, Homo sapiens
aggaaggtaggcccagtggaatttcc

SEQ ID NO: 1053 - DNA, 26 bp, Homo sapiens
ggaaggtaggcccagtggaatttccc

SEQ ID NO: 1054 - DNA, 26 bp, Homo sapiens
gaaggtaggcccagtggaatttccca

SEQ ID NO: 1055 - DNA, 26 bp, Homo sapiens
aaggtaggcccagtggaatttcccac

SEQ ID NO: 1056 - DNA, 26 bp, Homo sapiens
aggtaggcccagtggaatttcccact

SEQ ID NO: 1057 - DNA, 26 bp, Homo sapiens
ggtaggcccagtggaatttcccactc

SEQ ID NO: 1058 - DNA, 26 bp, Homo sapiens
gtaggcccagtggaatttcccactct

SEQ ID NO: 1059 - DNA, 26 bp, Homo sapiens
taggcccagtggaatttcccactctt

SEQ ID NO: 1060 - DNA, 26 bp, Homo sapiens
aggcccagtggaatttcccactcttt

SEQ ID NO: 1061 - DNA, 26 bp, Homo sapiens
ggcccagtggaatttcccactctttg

SEQ ID NO: 1062 - DNA, 26 bp, Homo sapiens
gcccagtggaatttcccactctttgt

SEQ ID NO: 1063 - DNA, 26 bp, Homo sapiens
cccagtggaatttcccactctttgtt

SEQ ID NO: 1064 - DNA, 26 bp, Homo sapiens
ccagtggaatttcccactctttgttt

SEQ ID NO: 1065 - DNA, 26 bp, Homo sapiens
cagtggaatttcccactctttgtttc

SEQ ID NO: 1066 - DNA, 26 bp, Homo sapiens
agtggaatttcccactctttgtttct

SEQ ID NO: 1067 - DNA, 26 bp, Homo sapiens
gtggaatttcccactctttgtttcta

SEQ ID NO: 1068 - DNA, 26 bp, Homo sapiens
tggaatttcccactctttgtttctaa

SEQ ID NO: 1069 - DNA, 26 bp, Homo sapiens
ggaatttcccactctttgtttctaag

SEQ ID NO: 1070 - DNA, 26 bp, Homo sapiens
gaatttcccactctttgtttctaagc

SEQ ID NO: 1071 - DNA, 26 bp, Homo sapiens
aatttcccactctttgtttctaagct

SEQ ID NO: 1072 - DNA, 26 bp, Homo sapiens
atttcccactctttgtttctaagctc

SEQ ID NO: 1073 - DNA, 26 bp, Homo sapiens
tttcccactctttgtttctaagctct

SEQ ID NO: 1074 - DNA, 26 bp, Homo sapiens
ttcccactctttgtttctaagctctt

SEQ ID NO: 1075 - DNA, 26 bp, Homo sapiens
tcccactctttgtttctaagctcttc

SEQ ID NO: 1076 - DNA, 26 bp, Homo sapiens
cccactctttgtttctaagctcttcg

SEQ ID NO: 1077 - DNA, 26 bp, Homo sapiens
ccactctttgtttctaagctcttcga

SEQ ID NO: 1078 - DNA, 26 bp, Homo sapiens
cactctttgtttctaagctcttcgag

SEQ ID NO: 1079 - DNA, 26 bp, Homo sapiens
actctttgtttctaagctcttcgaga

SEQ ID NO: 1080 - DNA, 26 bp, Homo sapiens
ctctttgtttctaagctcttcgagat

SEQ ID NO: 1081 - DNA, 26 bp, Homo sapiens
tctttgtttctaagctcttcgagata

SEQ ID NO: 1082 - DNA, 26 bp, Homo sapiens
ctttgtttctaagctcttcgagataa

SEQ ID NO: 1083 - DNA, 26 bp, Homo sapiens
tttgtttctaagctcttcgagataag

SEQ ID NO: 1084 - DNA, 26 bp, Homo sapiens
ttgtttctaagctcttcgagataagg

SEQ ID NO: 1085 - DNA, 26 bp, Homo sapiens
tgtttctaagctcttcgagataagga

SEQ ID NO: 1086 - DNA, 26 bp, Homo sapiens
gtttctaagctcttcgagataaggat

SEQ ID NO: 1087 - DNA, 26 bp, Homo sapiens
tttctaagctcttcgagataaggatg

SEQ ID NO: 1088 - DNA, 26 bp, Homo sapiens
ttctaagctcttcgagataaggatga

SEQ ID NO: 1089 - DNA, 26 bp, Homo sapiens
tctaagctcttcgagataaggatgac

SEQ ID NO: 1090 - DNA, 26 bp, Homo sapiens
ctaagctcttcgagataaggatgaca

SEQ ID NO: 1091 - DNA, 26 bp, Homo sapiens
taagctcttcgagataaggatgacat

SEQ ID NO: 1092 - DNA, 26 bp, Homo sapiens
aagctcttcgagataaggatgacatc

SEQ ID NO: 1093 - DNA, 26 bp, Homo sapiens
agctcttcgagataaggatgacatca

SEQ ID NO: 1094 - DNA, 26 bp, Homo sapiens
gctcttcgagataaggatgacatcag

SEQ ID NO: 1095 - DNA, 26 bp, Homo sapiens
ctcttcgagataaggatgacatcagg

SEQ ID NO: 1096 - DNA, 26 bp, Homo sapiens
tcttcgagataaggatgacatcaggg

SEQ ID NO: 1097 - DNA, 26 bp, Homo sapiens
cttcgagataaggatgacatcaggga

SEQ ID NO: 1098 - DNA, 26 bp, Homo sapiens
ttcgagataaggatgacatcagggac

SEQ ID NO: 1099 - DNA, 26 bp, Homo sapiens
tcgagataaggatgacatcagggact

SEQ ID NO: 1100 - DNA, 26 bp, Homo sapiens
cgagataaggatgacatcagggactc

SEQ ID NO: 1101 - DNA, 26 bp, Homo sapiens
gagataaggatgacatcagggactca

SEQ ID NO: 1102 - DNA, 26 bp, Homo sapiens
agataaggatgacatcagggactcag

SEQ ID NO: 1103 - DNA, 26 bp, Homo sapiens
gataaggatgacatcagggactcagc

SEQ ID NO: 1104 - DNA, 26 bp, Homo sapiens
ataaggatgacatcagggactcagct

SEQ ID NO: 1105 - DNA, 26 bp, Homo sapiens
taaggatgacatcagggactcagctg

SEQ ID NO: 1106 - DNA, 26 bp, Homo sapiens
aaggatgacatcagggactcagctgt

SEQ ID NO: 1107 - DNA, 26 bp, Homo sapiens
aggatgacatcagggactcagctgtt

SEQ ID NO: 1108 - DNA, 26 bp, Homo sapiens
ggatgacatcagggactcagctgtta

SEQ ID NO: 1109 - DNA, 26 bp, Homo sapiens
gatgacatcagggactcagctgttaa

SEQ ID NO: 1110 - DNA, 26 bp, Homo sapiens
atgacatcagggactcagctgttaat

SEQ ID NO: 1111 - DNA, 26 bp, Homo sapiens
tgacatcagggactcagctgttaatt

SEQ ID NO: 1112 - DNA, 26 bp, Homo sapiens
gacatcagggactcagctgttaatta

SEQ ID NO: 1113 - DNA, 26 bp, Homo sapiens
acatcagggactcagctgttaattaa

SEQ ID NO: 1114 - DNA, 26 bp, Homo sapiens
catcagggactcagctgttaattaaa

SEQ ID NO: 1115 - DNA, 26 bp, Homo sapiens
atcagggactcagctgttaattaaat

SEQ ID NO: 1116 - DNA, 26 bp, Homo sapiens
tcagggactcagctgttaattaaatg

SEQ ID NO: 1117 - DNA, 26 bp, Homo sapiens
cagggactcagctgttaattaaatgt

SEQ ID NO: 1118 - DNA, 26 bp, Homo sapiens
agggactcagctgttaattaaatgtg

SEQ ID NO: 1119 - DNA, 26 bp, Homo sapiens
gggactcagctgttaattaaatgtgg

SEQ ID NO: 1120 - DNA, 26 bp, Homo sapiens
ggactcagctgttaattaaatgtggg

SEQ ID NO: 1121 - DNA, 26 bp, Homo sapiens
gactcagctgttaattaaatgtgggc

SEQ ID NO: 1122 - DNA, 26 bp, Homo sapiens
actcagctgttaattaaatgtgggcg

SEQ ID NO: 1123 - DNA, 26 bp, Homo sapiens
ctcagctgttaattaaatgtgggcgg

SEQ ID NO: 1124 - DNA, 26 bp, Homo sapiens
tcagctgttaattaaatgtgggcggg

SEQ ID NO: 1125 - DNA, 26 bp, Homo sapiens
cagctgttaattaaatgtgggcgggt

SEQ ID NO: 1126 - DNA, 26 bp, Homo sapiens
agctgttaattaaatgtgggcgggtg

SEQ ID NO: 1127 - DNA, 26 bp, Homo sapiens
gctgttaattaaatgtgggcgggtga

SEQ ID NO: 1128 - DNA, 26 bp, Homo sapiens
ctgttaattaaatgtgggcgggtgag

SEQ ID NO: 1129 - DNA, 26 bp, Homo sapiens
tgttaattaaatgtgggcgggtgagc

SEQ ID NO: 1130 - DNA, 26 bp, Homo sapiens
gttaattaaatgtgggcgggtgagca

SEQ ID NO: 1131 - DNA, 26 bp, Homo sapiens
ttaattaaatgtgggcgggtgagcat

SEQ ID NO: 1132 - DNA, 26 bp, Homo sapiens
taattaaatgtgggcgggtgagcatg

SEQ ID NO: 1133 - DNA, 26 bp, Homo sapiens
aattaaatgtgggcgggtgagcatgg

SEQ ID NO: 1134 - DNA, 26 bp, Homo sapiens
attaaatgtgggcgggtgagcatggc

SEQ ID NO: 1135 - DNA, 26 bp, Homo sapiens
ttaaatgtgggcgggtgagcatggct

SEQ ID NO: 1136 - DNA, 26 bp, Homo sapiens
taaatgtgggcgggtgagcatggctt

SEQ ID NO: 1137 - DNA, 26 bp, Homo sapiens
aaatgtgggcgggtgagcatggcttc

SEQ ID NO: 1138 - DNA, 26 bp, Homo sapiens
aatgtgggcgggtgagcatggcttct

SEQ ID NO: 1139 - DNA, 26 bp, Homo sapiens
atgtgggcgggtgagcatggcttcta

SEQ ID NO: 1140 - DNA, 26 bp, Homo sapiens
tgtgggcgggtgagcatggcttctag

SEQ ID NO: 1141 - DNA, 26 bp, Homo sapiens
gtgggcgggtgagcatggcttctaga

SEQ ID NO: 1142 - DNA, 26 bp, Homo sapiens
tgggcgggtgagcatggcttctagag

SEQ ID NO: 1143 - DNA, 26 bp, Homo sapiens
gggcgggtgagcatggcttctagagg

SEQ ID NO: 1144 - DNA, 26 bp, Homo sapiens
ggcgggtgagcatggcttctagaggc

SEQ ID NO: 1145 - DNA, 26 bp, Homo sapiens
gcgggtgagcatggcttctagaggct

SEQ ID NO: 1146 - DNA, 26 bp, Homo sapiens
cgggtgagcatggcttctagaggctc

SEQ ID NO: 1147 - DNA, 26 bp, Homo sapiens
gggtgagcatggcttctagaggctcc

SEQ ID NO: 1148 - DNA, 26 bp, Homo sapiens
ggtgagcatggcttctagaggctcca

SEQ ID NO: 1149 - DNA, 26 bp, Homo sapiens
gtgagcatggcttctagaggctccat

SEQ ID NO: 1150 - DNA, 26 bp, Homo sapiens
tgagcatggcttctagaggctccatg

SEQ ID NO: 1151 - DNA, 26 bp, Homo sapiens
gagcatggcttctagaggctccatgc

SEQ ID NO: 1152 - DNA, 26 bp, Homo sapiens
agcatggcttctagaggctccatgct

SEQ ID NO: 1153 - DNA, 26 bp, Homo sapiens
gcatggcttctagaggctccatgctc

SEQ ID NO: 1154 - DNA, 26 bp, Homo sapiens
catggcttctagaggctccatgctct

SEQ ID NO: 1155 - DNA, 26 bp, Homo sapiens
atggcttctagaggctccatgctcta

SEQ ID NO: 1156 - DNA, 26 bp, Homo sapiens
tggcttctagaggctccatgctctag

SEQ ID NO: 1157 - DNA, 26 bp, Homo sapiens
ggcttctagaggctccatgctctaga

SEQ ID NO: 1158 - DNA, 26 bp, Homo sapiens
gcttctagaggctccatgctctagat

SEQ ID NO: 1159 - DNA, 26 bp, Homo sapiens
cttctagaggctccatgctctagatg

SEQ ID NO: 1160 - DNA, 26 bp, Homo sapiens
ttctagaggctccatgctctagatgc

SEQ ID NO: 1161 - DNA, 26 bp, Homo sapiens
tctagaggctccatgctctagatgct

SEQ ID NO: 1162 - DNA, 26 bp, Homo sapiens
ctagaggctccatgctctagatgctg

SEQ ID NO: 1163 - DNA, 26 bp, Homo sapiens
tagaggctccatgctctagatgctgg

SEQ ID NO: 1164 - DNA, 26 bp, Homo sapiens
agaggctccatgctctagatgctggg

SEQ ID NO: 1165 - DNA, 26 bp, Homo sapiens
gaggctccatgctctagatgctggga

SEQ ID NO: 1166 - DNA, 26 bp, Homo sapiens
aggctccatgctctagatgctgggac

SEQ ID NO: 1167 - DNA, 26 bp, Homo sapiens
ggctccatgctctagatgctgggacc

SEQ ID NO: 1168 - DNA, 26 bp, Homo sapiens
gctccatgctctagatgctgggaccc

SEQ ID NO: 1169 - DNA, 26 bp, Homo sapiens
ctccatgctctagatgctgggaccca

SEQ ID NO: 1170 - DNA, 26 bp, Homo sapiens
tccatgctctagatgctgggacccag

SEQ ID NO: 1171 - DNA, 26 bp, Homo sapiens
ccatgctctagatgctgggacccagg

SEQ ID NO: 1172 - DNA, 26 bp, Homo sapiens
catgctctagatgctgggacccaggt

SEQ ID NO: 1173 - DNA, 26 bp, Homo sapiens
atgctctagatgctgggacccaggtg

SEQ ID NO: 1174 - DNA, 26 bp, Homo sapiens
tgctctagatgctgggacccaggtgc

SEQ ID NO: 1175 - DNA, 26 bp, Homo sapiens
gctctagatgctgggacccaggtgct

SEQ ID NO: 1176 - DNA, 26 bp, Homo sapiens
ctctagatgctgggacccaggtgcta

SEQ ID NO: 1177 - DNA, 26 bp, Homo sapiens
tctagatgctgggacccaggtgctag

SEQ ID NO: 1178 - DNA, 26 bp, Homo sapiens
ctagatgctgggacccaggtgctaga

SEQ ID NO: 1179 - DNA, 26 bp, Homo sapiens
tagatgctgggacccaggtgctagag

SEQ ID NO: 1180 - DNA, 26 bp, Homo sapiens
agatgctgggacccaggtgctagagc

SEQ ID NO: 1181 - DNA, 26 bp, Homo sapiens
gatgctgggacccaggtgctagagca

SEQ ID NO: 1182 - DNA, 26 bp, Homo sapiens
atgctgggacccaggtgctagagcaa

SEQ ID NO: 1183 - DNA, 26 bp, Homo sapiens
tgctgggacccaggtgctagagcaaa

SEQ ID NO: 1184 - DNA, 26 bp, Homo sapiens
gctgggacccaggtgctagagcaaaa

SEQ ID NO: 1185 - DNA, 26 bp, Homo sapiens
ctgggacccaggtgctagagcaaaag

SEQ ID NO: 1186 - DNA, 26 bp, Homo sapiens
tgggacccaggtgctagagcaaaaga

SEQ ID NO: 1187 - DNA, 26 bp, Homo sapiens
gggacccaggtgctagagcaaaagag

SEQ ID NO: 1188 - DNA, 26 bp, Homo sapiens
ggacccaggtgctagagcaaaagagc

SEQ ID NO: 1189 - DNA, 26 bp, Homo sapiens
gacccaggtgctagagcaaaagagca

SEQ ID NO: 1190 - DNA, 26 bp, Homo sapiens
acccaggtgctagagcaaaagagcag

SEQ ID NO: 1191 - DNA, 26 bp, Homo sapiens
cccaggtgctagagcaaaagagcagg

SEQ ID NO: 1192 - DNA, 26 bp, Homo sapiens
ccaggtgctagagcaaaagagcaggt

SEQ ID NO: 1193 - DNA, 26 bp, Homo sapiens
caggtgctagagcaaaagagcaggtg

SEQ ID NO: 1194 - DNA, 26 bp, Homo sapiens
aggtgctagagcaaaagagcaggtgg

SEQ ID NO: 1195 - DNA, 26 bp, Homo sapiens
ggtgctagagcaaaagagcaggtggc

SEQ ID NO: 1196 - DNA, 26 bp, Homo sapiens
gtgctagagcaaaagagcaggtggct

SEQ ID NO: 1197 - DNA, 26 bp, Homo sapiens
tgctagagcaaaagagcaggtggctt

SEQ ID NO: 1198 - DNA, 26 bp, Homo sapiens
gctagagcaaaagagcaggtggcttc

SEQ ID NO: 1199 - DNA, 26 bp, Homo sapiens
ctagagcaaaagagcaggtggcttcc

SEQ ID NO: 1200 - DNA, 26 bp, Homo sapiens
tagagcaaaagagcaggtggcttcca

SEQ ID NO: 1201 - DNA, 26 bp, Homo sapiens
agagcaaaagagcaggtggcttccag

SEQ ID NO: 1202 - DNA, 26 bp, Homo sapiens
gagcaaaagagcaggtggcttccaga

SEQ ID NO: 1203 - DNA, 26 bp, Homo sapiens
agcaaaagagcaggtggcttccagag

SEQ ID NO: 1204 - DNA, 26 bp, Homo sapiens
gcaaaagagcaggtggcttccagagg

SEQ ID NO: 1205 - DNA, 26 bp, Homo sapiens
caaaagagcaggtggcttccagaggc

SEQ ID NO: 1206 - DNA, 26 bp, Homo sapiens
aaaagagcaggtggcttccagaggct

SEQ ID NO: 1207 - DNA, 26 bp, Homo sapiens
aaagagcaggtggcttccagaggctg

SEQ ID NO: 1208 - DNA, 26 bp, Homo sapiens
aagagcaggtggcttccagaggctga

SEQ ID NO: 1209 - DNA, 26 bp, Homo sapiens
agagcaggtggcttccagaggctgag

SEQ ID NO: 1210 - DNA, 26 bp, Homo sapiens
gagcaggtggcttccagaggctgaga

SEQ ID NO: 1211 - DNA, 26 bp, Homo sapiens
agcaggtggcttccagaggctgagag

SEQ ID NO: 1212 - DNA, 26 bp, Homo sapiens
gcaggtggcttccagaggctgagaga

SEQ ID NO: 1213 - DNA, 26 bp, Homo sapiens
caggtggcttccagaggctgagagaa

SEQ ID NO: 1214 - DNA, 26 bp, Homo sapiens
aggtggcttccagaggctgagagaaa

SEQ ID NO: 1215 - DNA, 26 bp, Homo sapiens
ggtggcttccagaggctgagagaaag

SEQ ID NO: 1216 - DNA, 26 bp, Homo sapiens
gtggcttccagaggctgagagaaagg

SEQ ID NO: 1217 - DNA, 26 bp, Homo sapiens
tggcttccagaggctgagagaaaggc

SEQ ID NO: 1218 - DNA, 26 bp, Homo sapiens
ggcttccagaggctgagagaaaggcc

SEQ ID NO: 1219 - DNA, 26 bp, Homo sapiens
gcttccagaggctgagagaaaggcct

SEQ ID NO: 1220 - DNA, 26 bp, Homo sapiens
cttccagaggctgagagaaaggcctg

SEQ ID NO: 1221 - DNA, 26 bp, Homo sapiens
ttccagaggctgagagaaaggcctgt

SEQ ID NO: 1222 - DNA, 26 bp, Homo sapiens
tccagaggctgagagaaaggcctgtc

SEQ ID NO: 1223 - DNA, 26 bp, Homo sapiens
ccagaggctgagagaaaggcctgtct

SEQ ID NO: 1224 - DNA, 26 bp, Homo sapiens
cagaggctgagagaaaggcctgtctc

SEQ ID NO: 1225 - DNA, 26 bp, Homo sapiens
agaggctgagagaaaggcctgtctct

SEQ ID NO: 1226 - DNA, 26 bp, Homo sapiens
gaggctgagagaaaggcctgtctctc

SEQ ID NO: 1227 - DNA, 26 bp, Homo sapiens
aggctgagagaaaggcctgtctctcc

SEQ ID NO: 1228 - DNA, 26 bp, Homo sapiens
ggctgagagaaaggcctgtctctcca

SEQ ID NO: 1229 - DNA, 26 bp, Homo sapiens
gctgagagaaaggcctgtctctccat

SEQ ID NO: 1230 - DNA, 26 bp, Homo sapiens
ctgagagaaaggcctgtctctccata

SEQ ID NO: 1231 - DNA, 26 bp, Homo sapiens
tgagagaaaggcctgtctctccatag

SEQ ID NO: 1232 - DNA, 26 bp, Homo sapiens
gagagaaaggcctgtctctccatagg

SEQ ID NO: 1233 - DNA, 26 bp, Homo sapiens
agagaaaggcctgtctctccataggc

SEQ ID NO: 1234 - DNA, 26 bp, Homo sapiens
gagaaaggcctgtctctccataggcc

SEQ ID NO: 1235 - DNA, 26 bp, Homo sapiens
agaaaggcctgtctctccataggcca

SEQ ID NO: 1236 - DNA, 26 bp, Homo sapiens
gaaaggcctgtctctccataggccac

SEQ ID NO: 1237 - DNA, 26 bp, Homo sapiens
aaaggcctgtctctccataggccaca

SEQ ID NO: 1238 - DNA, 26 bp, Homo sapiens
aaggcctgtctctccataggccacat

SEQ ID NO: 1239 - DNA, 26 bp, Homo sapiens
aggcctgtctctccataggccacatt

SEQ ID NO: 1240 - DNA, 26 bp, Homo sapiens
ggcctgtctctccataggccacattg

SEQ ID NO: 1241 - DNA, 26 bp, Homo sapiens
gcctgtctctccataggccacattgg

SEQ ID NO: 1242 - DNA, 26 bp, Homo sapiens
cctgtctctccataggccacattggg

SEQ ID NO: 1243 - DNA, 26 bp, Homo sapiens
ctgtctctccataggccacattggga

SEQ ID NO: 1244 - DNA, 26 bp, Homo sapiens
tgtctctccataggccacattgggaa

SEQ ID NO: 1245 - DNA, 26 bp, Homo sapiens
gtctctccataggccacattgggaag

SEQ ID NO: 1246 - DNA, 26 bp, Homo sapiens
tctctccataggccacattgggaagg

SEQ ID NO: 1247 - DNA, 26 bp, Homo sapiens
ctctccataggccacattgggaaggg

SEQ ID NO: 1248 - DNA, 26 bp, Homo sapiens
tctccataggccacattgggaagggg

SEQ ID NO: 1249 - DNA, 26 bp, Homo sapiens
ctccataggccacattgggaagggga

SEQ ID NO: 1250 - DNA, 26 bp, Homo sapiens
tccataggccacattgggaaggggag

SEQ ID NO: 1251 - DNA, 26 bp, Homo sapiens
ccataggccacattgggaaggggagg

SEQ ID NO: 1252 - DNA, 26 bp, Homo sapiens
cataggccacattgggaaggggaggc

SEQ ID NO: 1253 - DNA, 26 bp, Homo sapiens
ataggccacattgggaaggggaggca

SEQ ID NO: 1254 - DNA, 26 bp, Homo sapiens
taggccacattgggaaggggaggcac

SEQ ID NO: 1255 - DNA, 26 bp, Homo sapiens
aggccacattgggaaggggaggcacg

SEQ ID NO: 1256 - DNA, 26 bp, Homo sapiens
ggccacattgggaaggggaggcacgg

SEQ ID NO: 1257 - DNA, 26 bp, Homo sapiens
gccacattgggaaggggaggcacggg

SEQ ID NO: 1258 - DNA, 26 bp, Homo sapiens
ccacattgggaaggggaggcacggga

SEQ ID NO: 1259 - DNA, 26 bp, Homo sapiens
cacattgggaaggggaggcacgggac

SEQ ID NO: 1260 - DNA, 26 bp, Homo sapiens
acattgggaaggggaggcacgggacc

SEQ ID NO: 1261 - DNA, 26 bp, Homo sapiens
cattgggaaggggaggcacgggacct

SEQ ID NO: 1262 - DNA, 26 bp, Homo sapiens
attgggaaggggaggcacgggacctg

SEQ ID NO: 1263 - DNA, 26 bp, Homo sapiens
ttgggaaggggaggcacgggacctgg

SEQ ID NO: 1264 - DNA, 26 bp, Homo sapiens
tgggaaggggaggcacgggacctggg

SEQ ID NO: 1265 - DNA, 26 bp, Homo sapiens
gggaaggggaggcacgggacctgggg

SEQ ID NO: 1266 - DNA, 26 bp, Homo sapiens
ggaaggggaggcacgggacctggggc

SEQ ID NO: 1267 - DNA, 26 bp, Homo sapiens
gaaggggaggcacgggacctggggcc

SEQ ID NO: 1268 - DNA, 26 bp, Homo sapiens
aaggggaggcacgggacctggggccc

SEQ ID NO: 1269 - DNA, 26 bp, Homo sapiens
aggggaggcacgggacctggggcccc

SEQ ID NO: 1270 - DNA, 26 bp, Homo sapiens
ggggaggcacgggacctggggcccca

SEQ ID NO: 1271 - DNA, 26 bp, Homo sapiens
gggaggcacgggacctggggccccac

SEQ ID NO: 1272 - DNA, 26 bp, Homo sapiens
ggaggcacgggacctggggccccaca

SEQ ID NO: 1273 - DNA, 26 bp, Homo sapiens
gaggcacgggacctggggccccacac

SEQ ID NO: 1274 - DNA, 26 bp, Homo sapiens
aggcacgggacctggggccccacact

SEQ ID NO: 1275 - DNA, 26 bp, Homo sapiens
ggcacgggacctggggccccacacta

SEQ ID NO: 1276 - DNA, 26 bp, Homo sapiens
gcacgggacctggggccccacactag

SEQ ID NO: 1277 - DNA, 26 bp, Homo sapiens
cacgggacctggggccccacactagg

SEQ ID NO: 1278 - DNA, 26 bp, Homo sapiens
acgggacctggggccccacactaggg

SEQ ID NO: 1279 - DNA, 26 bp, Homo sapiens
cgggacctggggccccacactagggg

SEQ ID NO: 1280 - DNA, 26 bp, Homo sapiens
gggacctggggccccacactaggggt

SEQ ID NO: 1281 - DNA, 26 bp, Homo sapiens
ggacctggggccccacactaggggtg

SEQ ID NO: 1282 - DNA, 26 bp, Homo sapiens
gacctggggccccacactaggggtga

SEQ ID NO: 1283 - DNA, 26 bp, Homo sapiens
acctggggccccacactaggggtgag

SEQ ID NO: 1284 - DNA, 26 bp, Homo sapiens
cctggggccccacactaggggtgaga

SEQ ID NO: 1285 - DNA, 26 bp, Homo sapiens
ctggggccccacactaggggtgagac

SEQ ID NO: 1286 - DNA, 26 bp, Homo sapiens
tggggccccacactaggggtgagacc

SEQ ID NO: 1287 - DNA, 26 bp, Homo sapiens
ggggccccacactaggggtgagaccc

SEQ ID NO: 1288 - DNA, 26 bp, Homo sapiens
gggccccacactaggggtgagacccc

SEQ ID NO: 1289 - DNA, 26 bp, Homo sapiens
ggccccacactaggggtgagacccca

SEQ ID NO: 1290 - DNA, 26 bp, Homo sapiens
gccccacactaggggtgagaccccag

SEQ ID NO: 1291 - DNA, 26 bp, Homo sapiens
ccccacactaggggtgagaccccagg

SEQ ID NO: 1292 - DNA, 26 bp, Homo sapiens
cccacactaggggtgagaccccaggc

SEQ ID NO: 1293 - DNA, 26 bp, Homo sapiens
ccacactaggggtgagaccccaggcc

SEQ ID NO: 1294 - DNA, 26 bp, Homo sapiens
cacactaggggtgagaccccaggccc

SEQ ID NO: 1295 - DNA, 26 bp, Homo sapiens
acactaggggtgagaccccaggccca

SEQ ID NO: 1296 - DNA, 26 bp, Homo sapiens
cactaggggtgagaccccaggcccaa

SEQ ID NO: 1297 - DNA, 26 bp, Homo sapiens
actaggggtgagaccccaggcccaat

SEQ ID NO: 1298 - DNA, 26 bp, Homo sapiens
ctaggggtgagaccccaggcccaatc

SEQ ID NO: 1299 - DNA, 26 bp, Homo sapiens
taggggtgagaccccaggcccaatct

SEQ ID NO: 1300 - DNA, 26 bp, Homo sapiens
aggggtgagaccccaggcccaatctc

SEQ ID NO: 1301 - DNA, 26 bp, Homo sapiens
ggggtgagaccccaggcccaatctca

SEQ ID NO: 1302 - DNA, 26 bp, Homo sapiens
gggtgagaccccaggcccaatctcac

SEQ ID NO: 1303 - DNA, 26 bp, Homo sapiens
ggtgagaccccaggcccaatctcacc

SEQ ID NO: 1304 - DNA, 26 bp, Homo sapiens
gtgagaccccaggcccaatctcaccc

SEQ ID NO: 1305 - DNA, 26 bp, Homo sapiens
tgagaccccaggcccaatctcaccct

SEQ ID NO: 1306 - DNA, 26 bp, Homo sapiens
gagaccccaggcccaatctcaccctc

SEQ ID NO: 1307 - DNA, 26 bp, Homo sapiens
agaccccaggcccaatctcaccctca

SEQ ID NO: 1308 - DNA, 26 bp, Homo sapiens
gaccccaggcccaatctcaccctcat

SEQ ID NO: 1309 - DNA, 26 bp, Homo sapiens
accccaggcccaatctcaccctcatt

SEQ ID NO: 1310 - DNA, 26 bp, Homo sapiens
ccccaggcccaatctcaccctcattg

SEQ ID NO: 1311 - DNA, 26 bp, Homo sapiens
cccaggcccaatctcaccctcattgg

SEQ ID NO: 1312 - DNA, 26 bp, Homo sapiens
ccaggcccaatctcaccctcattggg

SEQ ID NO: 1313 - DNA, 26 bp, Homo sapiens
caggcccaatctcaccctcattggga

SEQ ID NO: 1314 - DNA, 26 bp, Homo sapiens
aggcccaatctcaccctcattgggaa

SEQ ID NO: 1315 - DNA, 26 bp, Homo sapiens
ggcccaatctcaccctcattgggaac

SEQ ID NO: 1316 - DNA, 26 bp, Homo sapiens
gcccaatctcaccctcattgggaact

SEQ ID NO: 1317 - DNA, 26 bp, Homo sapiens
cccaatctcaccctcattgggaactt

SEQ ID NO: 1318 - DNA, 26 bp, Homo sapiens
ccaatctcaccctcattgggaacttg

SEQ ID NO: 1319 - DNA, 26 bp, Homo sapiens
caatctcaccctcattgggaacttgg

SEQ ID NO: 1320 - DNA, 26 bp, Homo sapiens
aatctcaccctcattgggaacttggc

SEQ ID NO: 1321 - DNA, 26 bp, Homo sapiens
atctcaccctcattgggaacttggcc

SEQ ID NO: 1322 - DNA, 26 bp, Homo sapiens
tctcaccctcattgggaacttggcct

SEQ ID NO: 1323 - DNA, 26 bp, Homo sapiens
ctcaccctcattgggaacttggcctt

SEQ ID NO: 1324 - DNA, 26 bp, Homo sapiens
tcaccctcattgggaacttggccttc

SEQ ID NO: 1325 - DNA, 26 bp, Homo sapiens
caccctcattgggaacttggccttca

SEQ ID NO: 1326 - DNA, 26 bp, Homo sapiens
accctcattgggaacttggccttcac

SEQ ID NO: 1327 - DNA, 26 bp, Homo sapiens
ccctcattgggaacttggccttcacc

SEQ ID NO: 1328 - DNA, 26 bp, Homo sapiens
cctcattgggaacttggccttcaccg

SEQ ID NO: 1329 - DNA, 26 bp, Homo sapiens
ctcattgggaacttggccttcaccgt

SEQ ID NO: 1330 - DNA, 26 bp, Homo sapiens
tcattgggaacttggccttcaccgtc

SEQ ID NO: 1331 - DNA, 26 bp, Homo sapiens
cattgggaacttggccttcaccgtcc

SEQ ID NO: 1332 - DNA, 26 bp, Homo sapiens
attgggaacttggccttcaccgtccc

SEQ ID NO: 1333 - DNA, 26 bp, Homo sapiens
ttgggaacttggccttcaccgtcccc

SEQ ID NO: 1334 - DNA, 26 bp, Homo sapiens
tgggaacttggccttcaccgtccccc

SEQ ID NO: 1335 - DNA, 26 bp, Homo sapiens
gggaacttggccttcaccgtccccct

SEQ ID NO: 1336 - DNA, 26 bp, Homo sapiens
ggaacttggccttcaccgtccccctc

SEQ ID NO: 1337 - DNA, 26 bp, Homo sapiens
gaacttggccttcaccgtccccctcc

SEQ ID NO: 1338 - DNA, 26 bp, Homo sapiens
aacttggccttcaccgtccccctccc

SEQ ID NO: 1339 - DNA, 26 bp, Homo sapiens
acttggccttcaccgtccccctcccc

SEQ ID NO: 1340 - DNA, 26 bp, Homo sapiens
cttggccttcaccgtccccctccccc

SEQ ID NO: 1341 - DNA, 26 bp, Homo sapiens
ttggccttcaccgtccccctccccca

SEQ ID NO: 1342 - DNA, 26 bp, Homo sapiens
tggccttcaccgtccccctcccccag

SEQ ID NO: 1343 - DNA, 26 bp, Homo sapiens
ggccttcaccgtccccctcccccagt

SEQ ID NO: 1344 - DNA, 26 bp, Homo sapiens
gccttcaccgtccccctcccccagtg

SEQ ID NO: 1345 - DNA, 26 bp, Homo sapiens
ccttcaccgtccccctcccccagtgt

SEQ ID NO: 1346 - DNA, 26 bp, Homo sapiens
cttcaccgtccccctcccccagtgtt

SEQ ID NO: 1347 - DNA, 26 bp, Homo sapiens
ttcaccgtccccctcccccagtgttg

SEQ ID NO: 1348 - DNA, 26 bp, Homo sapiens
tcaccgtccccctcccccagtgttgt

SEQ ID NO: 1349 - DNA, 26 bp, Homo sapiens
caccgtccccctcccccagtgttgtt

SEQ ID NO: 1350 - DNA, 26 bp, Homo sapiens
accgtccccctcccccagtgttgttt

SEQ ID NO: 1351 - DNA, 26 bp, Homo sapiens
ccgtccccctcccccagtgttgtttt

SEQ ID NO: 1352 - DNA, 26 bp, Homo sapiens
cgtccccctcccccagtgttgttttt

SEQ ID NO: 1353 - DNA, 26 bp, Homo sapiens
gtccccctcccccagtgttgtttttt

SEQ ID NO: 1354 - DNA, 26 bp, Homo sapiens
tccccctcccccagtgttgttttttc

SEQ ID NO: 1355 - DNA, 26 bp, Homo sapiens
ccccctcccccagtgttgttttttca

SEQ ID NO: 1356 - DNA, 26 bp, Homo sapiens
cccctcccccagtgttgttttttcag

SEQ ID NO: 1357 - DNA, 26 bp, Homo sapiens
ccctcccccagtgttgttttttcagg

SEQ ID NO: 1358 - DNA, 26 bp, Homo sapiens
cctcccccagtgttgttttttcaggt

SEQ ID NO: 1359 - DNA, 26 bp, Homo sapiens
ctcccccagtgttgttttttcaggtc

SEQ ID NO: 1360 - DNA, 26 bp, Homo sapiens
tcccccagtgttgttttttcaggtct

SEQ ID NO: 1361 - DNA, 26 bp, Homo sapiens
cccccagtgttgttttttcaggtctg

SEQ ID NO: 1362 - DNA, 26 bp, Homo sapiens
ccccagtgttgttttttcaggtctga

SEQ ID NO: 1363 - DNA, 26 bp, Homo sapiens
cccagtgttgttttttcaggtctgat

SEQ ID NO: 1364 - DNA, 26 bp, Homo sapiens
ccagtgttgttttttcaggtctgatg

SEQ ID NO: 1365 - DNA, 26 bp, Homo sapiens
cagtgttgttttttcaggtctgatga

SEQ ID NO: 1366 - DNA, 26 bp, Homo sapiens
agtgttgttttttcaggtctgatgac

SEQ ID NO: 1367 - DNA, 26 bp, Homo sapiens
gtgttgttttttcaggtctgatgact

SEQ ID NO: 1368 - DNA, 26 bp, Homo sapiens
tgttgttttttcaggtctgatgactg

SEQ ID NO: 1369 - DNA, 26 bp, Homo sapiens
gttgttttttcaggtctgatgactgc

SEQ ID NO: 1370 - DNA, 26 bp, Homo sapiens
ttgttttttcaggtctgatgactgca

SEQ ID NO: 1371 - DNA, 26 bp, Homo sapiens
tgttttttcaggtctgatgactgcat

SEQ ID NO: 1372 - DNA, 26 bp, Homo sapiens
gttttttcaggtctgatgactgcatt

SEQ ID NO: 1373 - DNA, 26 bp, Homo sapiens
ttttttcaggtctgatgactgcattc

SEQ ID NO: 1374 - DNA, 26 bp, Homo sapiens
tttttcaggtctgatgactgcattct

SEQ ID NO: 1375 - DNA, 26 bp, Homo sapiens
ttttcaggtctgatgactgcattctg

SEQ ID NO: 1376 - DNA, 26 bp, Homo sapiens
tttcaggtctgatgactgcattctgc

SEQ ID NO: 1377 - DNA, 26 bp, Homo sapiens
ttcaggtctgatgactgcattctgca

SEQ ID NO: 1378 - DNA, 26 bp, Homo sapiens
tcaggtctgatgactgcattctgcat

SEQ ID NO: 1379 - DNA, 26 bp, Homo sapiens
caggtctgatgactgcattctgcatt

SEQ ID NO: 1380 - DNA, 26 bp, Homo sapiens
aggtctgatgactgcattctgcattc

SEQ ID NO: 1381 - DNA, 26 bp, Homo sapiens
ggtctgatgactgcattctgcattcc

SEQ ID NO: 1382 - DNA, 26 bp, Homo sapiens
gtctgatgactgcattctgcattcct

SEQ ID NO: 1383 - DNA, 26 bp, Homo sapiens
tctgatgactgcattctgcattcctg

SEQ ID NO: 1384 - DNA, 26 bp, Homo sapiens
ctgatgactgcattctgcattcctgt

SEQ ID NO: 1385 - DNA, 26 bp, Homo sapiens
tgatgactgcattctgcattcctgtg

SEQ ID NO: 1386 - DNA, 26 bp, Homo sapiens
gatgactgcattctgcattcctgtga

SEQ ID NO: 1387 - DNA, 26 bp, Homo sapiens
atgactgcattctgcattcctgtgac

SEQ ID NO: 1388 - DNA, 26 bp, Homo sapiens
tgactgcattctgcattcctgtgact

SEQ ID NO: 1389 - DNA, 26 bp, Homo sapiens
gactgcattctgcattcctgtgactg

SEQ ID NO: 1390 - DNA, 26 bp, Homo sapiens
actgcattctgcattcctgtgactgt

SEQ ID NO: 1391 - DNA, 26 bp, Homo sapiens
ctgcattctgcattcctgtgactgtc

SEQ ID NO: 1392 - DNA, 26 bp, Homo sapiens
tgcattctgcattcctgtgactgtcc

SEQ ID NO: 1393 - DNA, 26 bp, Homo sapiens
gcattctgcattcctgtgactgtccc

SEQ ID NO: 1394 - DNA, 26 bp, Homo sapiens
cattctgcattcctgtgactgtccct

SEQ ID NO: 1395 - DNA, 26 bp, Homo sapiens
attctgcattcctgtgactgtccctg

SEQ ID NO: 1396 - DNA, 26 bp, Homo sapiens
ttctgcattcctgtgactgtccctgc

SEQ ID NO: 1397 - DNA, 26 bp, Homo sapiens
tctgcattcctgtgactgtccctgcc

SEQ ID NO: 1398 - DNA, 26 bp, Homo sapiens
ctgcattcctgtgactgtccctgcct

SEQ ID NO: 1399 - DNA, 26 bp, Homo sapiens
tgcattcctgtgactgtccctgccta

SEQ ID NO: 1400 - DNA, 26 bp, Homo sapiens
gcattcctgtgactgtccctgcctac

SEQ ID NO: 1401 - DNA, 26 bp, Homo sapiens
cattcctgtgactgtccctgcctaca

SEQ ID NO: 1402 - DNA, 26 bp, Homo sapiens
attcctgtgactgtccctgcctacag

SEQ ID NO: 1403 - DNA, 26 bp, Homo sapiens
ttcctgtgactgtccctgcctacagc

SEQ ID NO: 1404 - DNA, 26 bp, Homo sapiens
tcctgtgactgtccctgcctacagcc

SEQ ID NO: 1405 - DNA, 26 bp, Homo sapiens
cctgtgactgtccctgcctacagccc

SEQ ID NO: 1406 - DNA, 26 bp, Homo sapiens
ctgtgactgtccctgcctacagccca

SEQ ID NO: 1407 - DNA, 26 bp, Homo sapiens
tgtgactgtccctgcctacagcccaa

SEQ ID NO: 1408 - DNA, 26 bp, Homo sapiens
gtgactgtccctgcctacagcccaac

SEQ ID NO: 1409 - DNA, 26 bp, Homo sapiens
tgactgtccctgcctacagcccaacc

SEQ ID NO: 1410 - DNA, 26 bp, Homo sapiens
gactgtccctgcctacagcccaaccc

SEQ ID NO: 1411 - DNA, 26 bp, Homo sapiens
actgtccctgcctacagcccaacccc

SEQ ID NO: 1412 - DNA, 26 bp, Homo sapiens
ctgtccctgcctacagcccaaccccc

SEQ ID NO: 1413 - DNA, 26 bp, Homo sapiens
tgtccctgcctacagcccaaccccca

SEQ ID NO: 1414 - DNA, 26 bp, Homo sapiens
gtccctgcctacagcccaacccccag

SEQ ID NO: 1415 - DNA, 26 bp, Homo sapiens
tccctgcctacagcccaacccccagc

SEQ ID NO: 1416 - DNA, 26 bp, Homo sapiens
ccctgcctacagcccaacccccagcc

SEQ ID NO: 1417 - DNA, 26 bp, Homo sapiens
cctgcctacagcccaacccccagccc

SEQ ID NO: 1418 - DNA, 26 bp, Homo sapiens
ctgcctacagcccaacccccagccct

SEQ ID NO: 1419 - DNA, 26 bp, Homo sapiens
tgcctacagcccaacccccagccctg

SEQ ID NO: 1420 - DNA, 26 bp, Homo sapiens
gcctacagcccaacccccagccctgg

SEQ ID NO: 1421 - DNA, 26 bp, Homo sapiens
cctacagcccaacccccagccctggt

SEQ ID NO: 1422 - DNA, 26 bp, Homo sapiens
ctacagcccaacccccagccctggtc

SEQ ID NO: 1423 - DNA, 26 bp, Homo sapiens
tacagcccaacccccagccctggtct

SEQ ID NO: 1424 - DNA, 26 bp, Homo sapiens
acagcccaacccccagccctggtctg

SEQ ID NO: 1425 - DNA, 26 bp, Homo sapiens
cagcccaacccccagccctggtctgg

SEQ ID NO: 1426 - DNA, 26 bp, Homo sapiens
agcccaacccccagccctggtctggc

SEQ ID NO: 1427 - DNA, 26 bp, Homo sapiens
gcccaacccccagccctggtctggcc

SEQ ID NO: 1428 - DNA, 26 bp, Homo sapiens
cccaacccccagccctggtctggcct

SEQ ID NO: 1429 - DNA, 26 bp, Homo sapiens
ccaacccccagccctggtctggcctt

SEQ ID NO: 1430 - DNA, 26 bp, Homo sapiens
caacccccagccctggtctggccttg

SEQ ID NO: 1431 - DNA, 26 bp, Homo sapiens
aacccccagccctggtctggccttga

SEQ ID NO: 1432 - DNA, 26 bp, Homo sapiens
acccccagccctggtctggccttgat

SEQ ID NO: 1433 - DNA, 26 bp, Homo sapiens
cccccagccctggtctggccttgatg

SEQ ID NO: 1434 - DNA, 26 bp, Homo sapiens
ccccagccctggtctggccttgatgc

SEQ ID NO: 1435 - DNA, 26 bp, Homo sapiens
cccagccctggtctggccttgatgcc

SEQ ID NO: 1436 - DNA, 26 bp, Homo sapiens
ccagccctggtctggccttgatgcct

SEQ ID NO: 1437 - DNA, 26 bp, Homo sapiens
cagccctggtctggccttgatgccta

SEQ ID NO: 1438 - DNA, 26 bp, Homo sapiens
agccctggtctggccttgatgcctag

SEQ ID NO: 1439 - DNA, 26 bp, Homo sapiens
gccctggtctggccttgatgcctagc

SEQ ID NO: 1440 - DNA, 26 bp, Homo sapiens
ccctggtctggccttgatgcctagct

SEQ ID NO: 1441 - DNA, 26 bp, Homo sapiens
cctggtctggccttgatgcctagcta

SEQ ID NO: 1442 - DNA, 26 bp, Homo sapiens
ctggtctggccttgatgcctagctaa

SEQ ID NO: 1443 - DNA, 26 bp, Homo sapiens
tggtctggccttgatgcctagctaat

SEQ ID NO: 1444 - DNA, 26 bp, Homo sapiens
ggtctggccttgatgcctagctaatt

SEQ ID NO: 1445 - DNA, 26 bp, Homo sapiens
gtctggccttgatgcctagctaattt

SEQ ID NO: 1446 - DNA, 26 bp, Homo sapiens
tctggccttgatgcctagctaatttt

SEQ ID NO: 1447 - DNA, 26 bp, Homo sapiens
ctggccttgatgcctagctaattttt

SEQ ID NO: 1448 - DNA, 26 bp, Homo sapiens
tggccttgatgcctagctaattttta

SEQ ID NO: 1449 - DNA, 26 bp, Homo sapiens
ggccttgatgcctagctaatttttaa

SEQ ID NO: 1450 - DNA, 26 bp, Homo sapiens
gccttgatgcctagctaatttttaaa

SEQ ID NO: 1451 - DNA, 26 bp, Homo sapiens
ccttgatgcctagctaatttttaaaa

SEQ ID NO: 1452 - DNA, 26 bp, Homo sapiens
cttgatgcctagctaatttttaaaaa

SEQ ID NO: 1453 - DNA, 26 bp, Homo sapiens
ttgatgcctagctaatttttaaaaac

SEQ ID NO: 1454 - DNA, 26 bp, Homo sapiens
tgatgcctagctaatttttaaaaacc

SEQ ID NO: 1455 - DNA, 26 bp, Homo sapiens
gatgcctagctaatttttaaaaacct

SEQ ID NO: 1456 - DNA, 26 bp, Homo sapiens
atgcctagctaatttttaaaaacctg

SEQ ID NO: 1457 - DNA, 26 bp, Homo sapiens
tgcctagctaatttttaaaaacctgc

SEQ ID NO: 1458 - DNA, 26 bp, Homo sapiens
gcctagctaatttttaaaaacctgcc

SEQ ID NO: 1459 - DNA, 26 bp, Homo sapiens
cctagctaatttttaaaaacctgccc

SEQ ID NO: 1460 - DNA, 26 bp, Homo sapiens
ctagctaatttttaaaaacctgcccc

SEQ ID NO: 1461 - DNA, 26 bp, Homo sapiens
tagctaatttttaaaaacctgcccca

SEQ ID NO: 1462 - DNA, 26 bp, Homo sapiens
agctaatttttaaaaacctgccccaa

SEQ ID NO: 1463 - DNA, 26 bp, Homo sapiens
gctaatttttaaaaacctgccccaag

SEQ ID NO: 1464 - DNA, 26 bp, Homo sapiens
ctaatttttaaaaacctgccccaagg

SEQ ID NO: 1465 - DNA, 26 bp, Homo sapiens
taatttttaaaaacctgccccaaggt

SEQ ID NO: 1466 - DNA, 26 bp, Homo sapiens
aatttttaaaaacctgccccaaggtt

SEQ ID NO: 1467 - DNA, 26 bp, Homo sapiens
atttttaaaaacctgccccaaggttg

SEQ ID NO: 1468 - DNA, 26 bp, Homo sapiens
tttttaaaaacctgccccaaggttgg

SEQ ID NO: 1469 - DNA, 26 bp, Homo sapiens
ttttaaaaacctgccccaaggttggg

SEQ ID NO: 1470 - DNA, 26 bp, Homo sapiens
tttaaaaacctgccccaaggttgggt

SEQ ID NO: 1471 - DNA, 26 bp, Homo sapiens
ttaaaaacctgccccaaggttgggtg

SEQ ID NO: 1472 - DNA, 26 bp, Homo sapiens
taaaaacctgccccaaggttgggtga

SEQ ID NO: 1473 - DNA, 26 bp, Homo sapiens
aaaaacctgccccaaggttgggtgaa

SEQ ID NO: 1474 - DNA, 26 bp, Homo sapiens
aaaacctgccccaaggttgggtgaaa

SEQ ID NO: 1475 - DNA, 26 bp, Homo sapiens
aaacctgccccaaggttgggtgaaac

SEQ ID NO: 1476 - DNA, 26 bp, Homo sapiens
aacctgccccaaggttgggtgaaacc

SEQ ID NO: 1477 - DNA, 26 bp, Homo sapiens
acctgccccaaggttgggtgaaaccc

SEQ ID NO: 1478 - DNA, 26 bp, Homo sapiens
cctgccccaaggttgggtgaaacccc

SEQ ID NO: 1479 - DNA, 26 bp, Homo sapiens
ctgccccaaggttgggtgaaacccca

SEQ ID NO: 1480 - DNA, 26 bp, Homo sapiens
tgccccaaggttgggtgaaaccccat

SEQ ID NO: 1481 - DNA, 26 bp, Homo sapiens
gccccaaggttgggtgaaaccccatc

SEQ ID NO: 1482 - DNA, 26 bp, Homo sapiens
ccccaaggttgggtgaaaccccatca

SEQ ID NO: 1483 - DNA, 26 bp, Homo sapiens
cccaaggttgggtgaaaccccatcat

SEQ ID NO: 1484 - DNA, 26 bp, Homo sapiens
ccaaggttgggtgaaaccccatcatc

SEQ ID NO: 1485 - DNA, 26 bp, Homo sapiens
caaggttgggtgaaaccccatcatct

SEQ ID NO: 1486 - DNA, 26 bp, Homo sapiens
aaggttgggtgaaaccccatcatctg

SEQ ID NO: 1487 - DNA, 26 bp, Homo sapiens
aggttgggtgaaaccccatcatctga

SEQ ID NO: 1488 - DNA, 26 bp, Homo sapiens
ggttgggtgaaaccccatcatctgaa

SEQ ID NO: 1489 - DNA, 26 bp, Homo sapiens
gttgggtgaaaccccatcatctgaat

SEQ ID NO: 1490 - DNA, 26 bp, Homo sapiens
ttgggtgaaaccccatcatctgaatg

SEQ ID NO: 1491 - DNA, 26 bp, Homo sapiens
tgggtgaaaccccatcatctgaatgc

SEQ ID NO: 1492 - DNA, 26 bp, Homo sapiens
gggtgaaaccccatcatctgaatgcc

SEQ ID NO: 1493 - DNA, 26 bp, Homo sapiens
ggtgaaaccccatcatctgaatgccc

SEQ ID NO: 1494 - DNA, 26 bp, Homo sapiens
gtgaaaccccatcatctgaatgccca

SEQ ID NO: 1495 - DNA, 26 bp, Homo sapiens
tgaaaccccatcatctgaatgcccaa

SEQ ID NO: 1496 - DNA, 26 bp, Homo sapiens
gaaaccccatcatctgaatgcccaat

SEQ ID NO: 1497 - DNA, 26 bp, Homo sapiens
aaaccccatcatctgaatgcccaatc

SEQ ID NO: 1498 - DNA, 26 bp, Homo sapiens
aaccccatcatctgaatgcccaatct

SEQ ID NO: 1499 - DNA, 26 bp, Homo sapiens
accccatcatctgaatgcccaatctc

SEQ ID NO: 1500 - DNA, 26 bp, Homo sapiens
ccccatcatctgaatgcccaatctca

SEQ ID NO: 1501 - DNA, 26 bp, Homo sapiens
cccatcatctgaatgcccaatctcaa

SEQ ID NO: 1502 - DNA, 26 bp, Homo sapiens
ccatcatctgaatgcccaatctcaaa

SEQ ID NO: 1503 - DNA, 26 bp, Homo sapiens
catcatctgaatgcccaatctcaaaa

SEQ ID NO: 1504 - DNA, 26 bp, Homo sapiens
atcatctgaatgcccaatctcaaaat

SEQ ID NO: 1505 - DNA, 26 bp, Homo sapiens
tcatctgaatgcccaatctcaaaatg

SEQ ID NO: 1506 - DNA, 26 bp, Homo sapiens
catctgaatgcccaatctcaaaatgt

SEQ ID NO: 1507 - DNA, 26 bp, Homo sapiens
atctgaatgcccaatctcaaaatgtt

SEQ ID NO: 1508 - DNA, 26 bp, Homo sapiens
tctgaatgcccaatctcaaaatgttc

SEQ ID NO: 1509 - DNA, 26 bp, Homo sapiens
ctgaatgcccaatctcaaaatgttca

SEQ ID NO: 1510 - DNA, 26 bp, Homo sapiens
tgaatgcccaatctcaaaatgttcac

SEQ ID NO: 1511 - DNA, 26 bp, Homo sapiens
gaatgcccaatctcaaaatgttcact

SEQ ID NO: 1512 - DNA, 26 bp, Homo sapiens
aatgcccaatctcaaaatgttcacta

SEQ ID NO: 1513 - DNA, 26 bp, Homo sapiens
atgcccaatctcaaaatgttcactat

SEQ ID NO: 1514 - DNA, 26 bp, Homo sapiens
tgcccaatctcaaaatgttcactatc

SEQ ID NO: 1515 - DNA, 26 bp, Homo sapiens
gcccaatctcaaaatgttcactatca

SEQ ID NO: 1516 - DNA, 26 bp, Homo sapiens
cccaatctcaaaatgttcactatcag

SEQ ID NO: 1517 - DNA, 26 bp, Homo sapiens
ccaatctcaaaatgttcactatcagg

SEQ ID NO: 1518 - DNA, 26 bp, Homo sapiens
caatctcaaaatgttcactatcagga

SEQ ID NO: 1519 - DNA, 26 bp, Homo sapiens
aatctcaaaatgttcactatcaggag

SEQ ID NO: 1520 - DNA, 26 bp, Homo sapiens
atctcaaaatgttcactatcaggagg

SEQ ID NO: 1521 - DNA, 26 bp, Homo sapiens
tctcaaaatgttcactatcaggaggt

SEQ ID NO: 1522 - DNA, 26 bp, Homo sapiens
ctcaaaatgttcactatcaggaggtg

SEQ ID NO: 1523 - DNA, 26 bp, Homo sapiens
tcaaaatgttcactatcaggaggtga

SEQ ID NO: 1524 - DNA, 26 bp, Homo sapiens
caaaatgttcactatcaggaggtgat

SEQ ID NO: 1525 - DNA, 26 bp, Homo sapiens
aaaatgttcactatcaggaggtgata

SEQ ID NO: 1526 - DNA, 26 bp, Homo sapiens
aaatgttcactatcaggaggtgataa

SEQ ID NO: 1527 - DNA, 26 bp, Homo sapiens
aatgttcactatcaggaggtgataat

SEQ ID NO: 1528 - DNA, 26 bp, Homo sapiens
atgttcactatcaggaggtgataatc

SEQ ID NO: 1529 - DNA, 26 bp, Homo sapiens
tgttcactatcaggaggtgataatca

SEQ ID NO: 1530 - DNA, 26 bp, Homo sapiens
gttcactatcaggaggtgataatcat

SEQ ID NO: 1531 - DNA, 26 bp, Homo sapiens
ttcactatcaggaggtgataatcata

SEQ ID NO: 1532 - DNA, 26 bp, Homo sapiens
tcactatcaggaggtgataatcatag

SEQ ID NO: 1533 - DNA, 26 bp, Homo sapiens
cactatcaggaggtgataatcatagt

SEQ ID NO: 1534 - DNA, 26 bp, Homo sapiens
actatcaggaggtgataatcatagta

SEQ ID NO: 1535 - DNA, 26 bp, Homo sapiens
ctatcaggaggtgataatcatagtaa

SEQ ID NO: 1536 - DNA, 26 bp, Homo sapiens
tatcaggaggtgataatcatagtaat

SEQ ID NO: 1537 - DNA, 26 bp, Homo sapiens
atcaggaggtgataatcatagtaatt

SEQ ID NO: 1538 - DNA, 26 bp, Homo sapiens
tcaggaggtgataatcatagtaatta

SEQ ID NO: 1539 - DNA, 26 bp, Homo sapiens
caggaggtgataatcatagtaattaa

SEQ ID NO: 1540 - DNA, 26 bp, Homo sapiens
aggaggtgataatcatagtaattaac

SEQ ID NO: 1541 - DNA, 26 bp, Homo sapiens
ggaggtgataatcatagtaattaact

SEQ ID NO: 1542 - DNA, 26 bp, Homo sapiens
gaggtgataatcatagtaattaacta

SEQ ID NO: 1543 - DNA, 26 bp, Homo sapiens
aggtgataatcatagtaattaactag

SEQ ID NO: 1544 - DNA, 26 bp, Homo sapiens
ggtgataatcatagtaattaactagt

SEQ ID NO: 1545 - DNA, 26 bp, Homo sapiens
gtgataatcatagtaattaactagtt

SEQ ID NO: 1546 - DNA, 26 bp, Homo sapiens
tgataatcatagtaattaactagtta

SEQ ID NO: 1547 - DNA, 26 bp, Homo sapiens
gataatcatagtaattaactagttac

SEQ ID NO: 1548 - DNA, 26 bp, Homo sapiens
ataatcatagtaattaactagttaca

SEQ ID NO: 1549 - DNA, 26 bp, Homo sapiens
taatcatagtaattaactagttacat

SEQ ID NO: 1550 - DNA, 26 bp, Homo sapiens
aatcatagtaattaactagttacatt

SEQ ID NO: 1551 - DNA, 26 bp, Homo sapiens
atcatagtaattaactagttacatta

SEQ ID NO: 1552 - DNA, 26 bp, Homo sapiens
tcatagtaattaactagttacattaa

SEQ ID NO: 1553 - DNA, 26 bp, Homo sapiens
catagtaattaactagttacattaat

SEQ ID NO: 1554 - DNA, 26 bp, Homo sapiens
atagtaattaactagttacattaatt

SEQ ID NO: 1555 - DNA, 26 bp, Homo sapiens
tagtaattaactagttacattaattg

SEQ ID NO: 1556 - DNA, 26 bp, Homo sapiens
agtaattaactagttacattaattga

SEQ ID NO: 1557 - DNA, 26 bp, Homo sapiens
gtaattaactagttacattaattgat

SEQ ID NO: 1558 - DNA, 26 bp, Homo sapiens
taattaactagttacattaattgatg

SEQ ID NO: 1559 - DNA, 26 bp, Homo sapiens
aattaactagttacattaattgatgt

SEQ ID NO: 1560 - DNA, 26 bp, Homo sapiens
attaactagttacattaattgatgtt

SEQ ID NO: 1561 - DNA, 26 bp, Homo sapiens
ttaactagttacattaattgatgtta

SEQ ID NO: 1562 - DNA, 26 bp, Homo sapiens
taactagttacattaattgatgttat

SEQ ID NO: 1563 - DNA, 26 bp, Homo sapiens
aactagttacattaattgatgttatt

SEQ ID NO: 1564 - DNA, 26 bp, Homo sapiens
actagttacattaattgatgttattc

SEQ ID NO: 1565 - DNA, 26 bp, Homo sapiens
ctagttacattaattgatgttattca

SEQ ID NO: 1566 - DNA, 26 bp, Homo sapiens
tagttacattaattgatgttattcac

SEQ ID NO: 1567 - DNA, 26 bp, Homo sapiens
agttacattaattgatgttattcaca

SEQ ID NO: 1568 - DNA, 26 bp, Homo sapiens
gttacattaattgatgttattcacaa

SEQ ID NO: 1569 - DNA, 26 bp, Homo sapiens
ttacattaattgatgttattcacaac

SEQ ID NO: 1570 - DNA, 26 bp, Homo sapiens
tacattaattgatgttattcacaaca

SEQ ID NO: 1571 - DNA, 26 bp, Homo sapiens
acattaattgatgttattcacaacat

SEQ ID NO: 1572 - DNA, 26 bp, Homo sapiens
cattaattgatgttattcacaacatt

SEQ ID NO: 1573 - DNA, 26 bp, Homo sapiens
attaattgatgttattcacaacatta

SEQ ID NO: 1574 - DNA, 26 bp, Homo sapiens
ttaattgatgttattcacaacattaa

SEQ ID NO: 1575 - DNA, 26 bp, Homo sapiens
taattgatgttattcacaacattaac

SEQ ID NO: 1576 - DNA, 26 bp, Homo sapiens
aattgatgttattcacaacattaact

SEQ ID NO: 1577 - DNA, 26 bp, Homo sapiens
attgatgttattcacaacattaacta

SEQ ID NO: 1578 - DNA, 26 bp, Homo sapiens
ttgatgttattcacaacattaactag

SEQ ID NO: 1579 - DNA, 26 bp, Homo sapiens
tgatgttattcacaacattaactaga

SEQ ID NO: 1580 - DNA, 26 bp, Homo sapiens
gatgttattcacaacattaactagaa

SEQ ID NO: 1581 - DNA, 26 bp, Homo sapiens
atgttattcacaacattaactagaat

SEQ ID NO: 1582 - DNA, 26 bp, Homo sapiens
tgttattcacaacattaactagaatc

SEQ ID NO: 1583 - DNA, 26 bp, Homo sapiens
gttattcacaacattaactagaatct

SEQ ID NO: 1584 - DNA, 26 bp, Homo sapiens
ttattcacaacattaactagaatctg

SEQ ID NO: 1585 - DNA, 26 bp, Homo sapiens
tattcacaacattaactagaatctgt

SEQ ID NO: 1586 - DNA, 26 bp, Homo sapiens
attcacaacattaactagaatctgta

SEQ ID NO: 1587 - DNA, 26 bp, Homo sapiens
ttcacaacattaactagaatctgtac

SEQ ID NO: 1588 - DNA, 26 bp, Homo sapiens
tcacaacattaactagaatctgtaca

SEQ ID NO: 1589 - DNA, 26 bp, Homo sapiens
cacaacattaactagaatctgtacag

SEQ ID NO: 1590 - DNA, 26 bp, Homo sapiens
acaacattaactagaatctgtacagc

SEQ ID NO: 1591 - DNA, 26 bp, Homo sapiens
caacattaactagaatctgtacagct

SEQ ID NO: 1592 - DNA, 26 bp, Homo sapiens
aacattaactagaatctgtacagctt

SEQ ID NO: 1593 - DNA, 26 bp, Homo sapiens
acattaactagaatctgtacagcttc

SEQ ID NO: 1594 - DNA, 26 bp, Homo sapiens
cattaactagaatctgtacagcttct

SEQ ID NO: 1595 - DNA, 26 bp, Homo sapiens
attaactagaatctgtacagcttctt

SEQ ID NO: 1596 - DNA, 26 bp, Homo sapiens
ttaactagaatctgtacagcttcttg

SEQ ID NO: 1597 - DNA, 26 bp, Homo sapiens
taactagaatctgtacagcttcttgc

SEQ ID NO: 1598 - DNA, 26 bp, Homo sapiens
aactagaatctgtacagcttcttgct

SEQ ID NO: 1599 - DNA, 26 bp, Homo sapiens
actagaatctgtacagcttcttgcta

SEQ ID NO: 1600 - DNA, 26 bp, Homo sapiens
ctagaatctgtacagcttcttgctat

SEQ ID NO: 1601 - DNA, 26 bp, Homo sapiens
tagaatctgtacagcttcttgctatt

SEQ ID NO: 1602 - DNA, 26 bp, Homo sapiens
agaatctgtacagcttcttgctattt

SEQ ID NO: 1603 - DNA, 26 bp, Homo sapiens
gaatctgtacagcttcttgctattta

SEQ ID NO: 1604 - DNA, 26 bp, Homo sapiens
aatctgtacagcttcttgctatttac

SEQ ID NO: 1605 - DNA, 26 bp, Homo sapiens
atctgtacagcttcttgctatttaca

SEQ ID NO: 1606 - DNA, 26 bp, Homo sapiens
tctgtacagcttcttgctatttacaa

SEQ ID NO: 1607 - DNA, 26 bp, Homo sapiens
ctgtacagcttcttgctatttacaaa

SEQ ID NO: 1608 - DNA, 26 bp, Homo sapiens
tgtacagcttcttgctatttacaaag

SEQ ID NO: 1609 - DNA, 26 bp, Homo sapiens
gtacagcttcttgctatttacaaagt

SEQ ID NO: 1610 - DNA, 26 bp, Homo sapiens
tacagcttcttgctatttacaaagtg

SEQ ID NO: 1611 - DNA, 26 bp, Homo sapiens
acagcttcttgctatttacaaagtgc

SEQ ID NO: 1612 - DNA, 26 bp, Homo sapiens
cagcttcttgctatttacaaagtgct

SEQ ID NO: 1613 - DNA, 26 bp, Homo sapiens
agcttcttgctatttacaaagtgctg

SEQ ID NO: 1614 - DNA, 26 bp, Homo sapiens
gcttcttgctatttacaaagtgctga

SEQ ID NO: 1615 - DNA, 26 bp, Homo sapiens
cttcttgctatttacaaagtgctgaa

SEQ ID NO: 1616 - DNA, 26 bp, Homo sapiens
ttcttgctatttacaaagtgctgaaa

SEQ ID NO: 1617 - DNA, 26 bp, Homo sapiens
tcttgctatttacaaagtgctgaaac

SEQ ID NO: 1618 - DNA, 26 bp, Homo sapiens
cttgctatttacaaagtgctgaaaca

SEQ ID NO: 1619 - DNA, 26 bp, Homo sapiens
ttgctatttacaaagtgctgaaacac

SEQ ID NO: 1620 - DNA, 26 bp, Homo sapiens
tgctatttacaaagtgctgaaacaca

SEQ ID NO: 1621 - DNA, 26 bp, Homo sapiens
gctatttacaaagtgctgaaacacac

SEQ ID NO: 1622 - DNA, 26 bp, Homo sapiens
ctatttacaaagtgctgaaacacaca

SEQ ID NO: 1623 - DNA, 26 bp, Homo sapiens
tatttacaaagtgctgaaacacacac

SEQ ID NO: 1624 - DNA, 26 bp, Homo sapiens
atttacaaagtgctgaaacacacaca

SEQ ID NO: 1625 - DNA, 26 bp, Homo sapiens
tttacaaagtgctgaaacacacacat

SEQ ID NO: 1626 - DNA, 26 bp, Homo sapiens
ttacaaagtgctgaaacacacacata

SEQ ID NO: 1627 - DNA, 26 bp, Homo sapiens
tacaaagtgctgaaacacacacatag

SEQ ID NO: 1628 - DNA, 26 bp, Homo sapiens
acaaagtgctgaaacacacacataga

SEQ ID NO: 1629 - DNA, 26 bp, Homo sapiens
caaagtgctgaaacacacacatagac

SEQ ID NO: 1630 - DNA, 26 bp, Homo sapiens
aaagtgctgaaacacacacatagaca

SEQ ID NO: 1631 - DNA, 26 bp, Homo sapiens
aagtgctgaaacacacacatagacac

SEQ ID NO: 1632 - DNA, 26 bp, Homo sapiens
agtgctgaaacacacacatagacaca

SEQ ID NO: 1633 - DNA, 26 bp, Homo sapiens
gtgctgaaacacacacatagacacac

SEQ ID NO: 1634 - DNA, 26 bp, Homo sapiens
tgctgaaacacacacatagacacaca

SEQ ID NO: 1635 - DNA, 26 bp, Homo sapiens
gctgaaacacacacatagacacacac

SEQ ID NO: 1636 - DNA, 26 bp, Homo sapiens
ctgaaacacacacatagacacacaca

SEQ ID NO: 1637 - DNA, 26 bp, Homo sapiens
tgaaacacacacatagacacacacac

SEQ ID NO: 1638 - DNA, 26 bp, Homo sapiens
gaaacacacacatagacacacacaca

SEQ ID NO: 1639 - DNA, 26 bp, Homo sapiens
aaacacacacatagacacacacacac

SEQ ID NO: 1640 - DNA, 26 bp, Homo sapiens
aacacacacatagacacacacacacc

SEQ ID NO: 1641 - DNA, 26 bp, Homo sapiens
acacacacatagacacacacacacct

SEQ ID NO: 1642 - DNA, 26 bp, Homo sapiens
cacacacatagacacacacacacctc

SEQ ID NO: 1643 - DNA, 26 bp, Homo sapiens
acacacatagacacacacacacctct

SEQ ID NO: 1644 - DNA, 26 bp, Homo sapiens
cacacatagacacacacacacctctt

SEQ ID NO: 1645 - DNA, 26 bp, Homo sapiens
acacatagacacacacacacctcttt

SEQ ID NO: 1646 - DNA, 26 bp, Homo sapiens
cacatagacacacacacacctctttt

SEQ ID NO: 1647 - DNA, 26 bp, Homo sapiens
acatagacacacacacacctcttttg

SEQ ID NO: 1648 - DNA, 26 bp, Homo sapiens
catagacacacacacacctcttttgg

SEQ ID NO: 1649 - DNA, 26 bp, Homo sapiens
atagacacacacacacctcttttggt

SEQ ID NO: 1650 - DNA, 26 bp, Homo sapiens
tagacacacacacacctcttttggtc

SEQ ID NO: 1651 - DNA, 26 bp, Homo sapiens
agacacacacacacctcttttggtct

SEQ ID NO: 1652 - DNA, 26 bp, Homo sapiens
gacacacacacacctcttttggtctt

SEQ ID NO: 1653 - DNA, 26 bp, Homo sapiens
acacacacacacctcttttggtcttc

SEQ ID NO: 1654 - DNA, 26 bp, Homo sapiens
cacacacacacctcttttggtcttct

SEQ ID NO: 1655 - DNA, 26 bp, Homo sapiens
acacacacacctcttttggtcttctc

SEQ ID NO: 1656 - DNA, 26 bp, Homo sapiens
cacacacacctcttttggtcttctca

SEQ ID NO: 1657 - DNA, 26 bp, Homo sapiens
acacacacctcttttggtcttctcag

SEQ ID NO: 1658 - DNA, 26 bp, Homo sapiens
cacacacctcttttggtcttctcagt

SEQ ID NO: 1659 - DNA, 26 bp, Homo sapiens
acacacctcttttggtcttctcagta

SEQ ID NO: 1660 - DNA, 26 bp, Homo sapiens
cacacctcttttggtcttctcagtag

SEQ ID NO: 1661 - DNA, 26 bp, Homo sapiens
acacctcttttggtcttctcagtagc

SEQ ID NO: 1662 - DNA, 26 bp, Homo sapiens
cacctcttttggtcttctcagtagct

SEQ ID NO: 1663 - DNA, 26 bp, Homo sapiens
acctcttttggtcttctcagtagctg

SEQ ID NO: 1664 - DNA, 26 bp, Homo sapiens
cctcttttggtcttctcagtagctgc

SEQ ID NO: 1665 - DNA, 26 bp, Homo sapiens
ctcttttggtcttctcagtagctgcg

SEQ ID NO: 1666 - DNA, 26 bp, Homo sapiens
tcttttggtcttctcagtagctgcgt

SEQ ID NO: 1667 - DNA, 26 bp, Homo sapiens
cttttggtcttctcagtagctgcgtg

SEQ ID NO: 1668 - DNA, 26 bp, Homo sapiens
ttttggtcttctcagtagctgcgtgt

SEQ ID NO: 1669 - DNA, 26 bp, Homo sapiens
tttggtcttctcagtagctgcgtgtc

SEQ ID NO: 1670 - DNA, 26 bp, Homo sapiens
ttggtcttctcagtagctgcgtgtcg

SEQ ID NO: 1671 - DNA, 26 bp, Homo sapiens
tggtcttctcagtagctgcgtgtcgg

SEQ ID NO: 1672 - DNA, 26 bp, Homo sapiens
ggtcttctcagtagctgcgtgtcggc

SEQ ID NO: 1673 - DNA, 26 bp, Homo sapiens
gtcttctcagtagctgcgtgtcggca

SEQ ID NO: 1674 - DNA, 26 bp, Homo sapiens
tcttctcagtagctgcgtgtcggcag

SEQ ID NO: 1675 - DNA, 26 bp, Homo sapiens
cttctcagtagctgcgtgtcggcagg

SEQ ID NO: 1676 - DNA, 26 bp, Homo sapiens
ttctcagtagctgcgtgtcggcagga

SEQ ID NO: 1677 - DNA, 26 bp, Homo sapiens
tctcagtagctgcgtgtcggcaggac

SEQ ID NO: 1678 - DNA, 26 bp, Homo sapiens
ctcagtagctgcgtgtcggcaggacc

SEQ ID NO: 1679 - DNA, 26 bp, Homo sapiens
tcagtagctgcgtgtcggcaggacca

SEQ ID NO: 1680 - DNA, 26 bp, Homo sapiens
cagtagctgcgtgtcggcaggaccag

SEQ ID NO: 1681 - DNA, 26 bp, Homo sapiens
agtagctgcgtgtcggcaggaccagg

SEQ ID NO: 1682 - DNA, 26 bp, Homo sapiens
gtagctgcgtgtcggcaggaccaggg

SEQ ID NO: 1683 - DNA, 26 bp, Homo sapiens
tagctgcgtgtcggcaggaccaggga

SEQ ID NO: 1684 - DNA, 26 bp, Homo sapiens
agctgcgtgtcggcaggaccagggat

SEQ ID NO: 1685 - DNA, 26 bp, Homo sapiens
gctgcgtgtcggcaggaccagggatc

SEQ ID NO: 1686 - DNA, 26 bp, Homo sapiens
ctgcgtgtcggcaggaccagggatct

SEQ ID NO: 1687 - DNA, 26 bp, Homo sapiens
tgcgtgtcggcaggaccagggatctg

SEQ ID NO: 1688 - DNA, 26 bp, Homo sapiens
gcgtgtcggcaggaccagggatctgg

SEQ ID NO: 1689 - DNA, 26 bp, Homo sapiens
cgtgtcggcaggaccagggatctggg

SEQ ID NO: 1690 - DNA, 26 bp, Homo sapiens
gtgtcggcaggaccagggatctggga

SEQ ID NO: 1691 - DNA, 26 bp, Homo sapiens
tgtcggcaggaccagggatctgggat

SEQ ID NO: 1692 - DNA, 26 bp, Homo sapiens
gtcggcaggaccagggatctgggatt

SEQ ID NO: 1693 - DNA, 26 bp, Homo sapiens
tcggcaggaccagggatctgggattt

SEQ ID NO: 1694 - DNA, 26 bp, Homo sapiens
cggcaggaccagggatctgggatttc

SEQ ID NO: 1695 - DNA, 26 bp, Homo sapiens
ggcaggaccagggatctgggatttcc

SEQ ID NO: 1696 - DNA, 26 bp, Homo sapiens
gcaggaccagggatctgggatttcca

SEQ ID NO: 1697 - DNA, 26 bp, Homo sapiens
caggaccagggatctgggatttccat

SEQ ID NO: 1698 - DNA, 26 bp, Homo sapiens
aggaccagggatctgggatttccatt

SEQ ID NO: 1699 - DNA, 26 bp, Homo sapiens
ggaccagggatctgggatttccattt

SEQ ID NO: 1700 - DNA, 26 bp, Homo sapiens
gaccagggatctgggatttccatttt

SEQ ID NO: 1701 - DNA, 26 bp, Homo sapiens
accagggatctgggatttccatttta

SEQ ID NO: 1702 - DNA, 26 bp, Homo sapiens
ccagggatctgggatttccattttat

SEQ ID NO: 1703 - DNA, 26 bp, Homo sapiens
cagggatctgggatttccattttata

SEQ ID NO: 1704 - DNA, 26 bp, Homo sapiens
agggatctgggatttccattttatag

SEQ ID NO: 1705 - DNA, 26 bp, Homo sapiens
gggatctgggatttccattttatagg

SEQ ID NO: 1706 - DNA, 26 bp, Homo sapiens
ggatctgggatttccattttatagga

SEQ ID NO: 1707 - DNA, 26 bp, Homo sapiens
gatctgggatttccattttataggag

SEQ ID NO: 1708 - DNA, 26 bp, Homo sapiens
atctgggatttccattttataggaga

SEQ ID NO: 1709 - DNA, 26 bp, Homo sapiens
tctgggatttccattttataggagaa

SEQ ID NO: 1710 - DNA, 26 bp, Homo sapiens
ctgggatttccattttataggagaag

SEQ ID NO: 1711 - DNA, 26 bp, Homo sapiens
tgggatttccattttataggagaaga

SEQ ID NO: 1712 - DNA, 26 bp, Homo sapiens
gggatttccattttataggagaagaa

SEQ ID NO: 1713 - DNA, 26 bp, Homo sapiens
ggatttccattttataggagaagaaa

SEQ ID NO: 1714 - DNA, 26 bp, Homo sapiens
gatttccattttataggagaagaaag

SEQ ID NO: 1715 - DNA, 26 bp, Homo sapiens
atttccattttataggagaagaaagt

SEQ ID NO: 1716 - DNA, 26 bp, Homo sapiens
tttccattttataggagaagaaagtg

SEQ ID NO: 1717 - DNA, 26 bp, Homo sapiens
ttccattttataggagaagaaagtga

SEQ ID NO: 1718 - DNA, 26 bp, Homo sapiens
tccattttataggagaagaaagtgag

SEQ ID NO: 1719 - DNA, 26 bp, Homo sapiens
ccattttataggagaagaaagtgagg

SEQ ID NO: 1720 - DNA, 26 bp, Homo sapiens
cattttataggagaagaaagtgaggc

SEQ ID NO: 1721 - DNA, 26 bp, Homo sapiens
attttataggagaagaaagtgaggcc

SEQ ID NO: 1722 - DNA, 26 bp, Homo sapiens
ttttataggagaagaaagtgaggccc

SEQ ID NO: 1723 - DNA, 26 bp, Homo sapiens
tttataggagaagaaagtgaggccca

SEQ ID NO: 1724 - DNA, 26 bp, Homo sapiens
ttataggagaagaaagtgaggcccag

SEQ ID NO: 1725 - DNA, 26 bp, Homo sapiens
tataggagaagaaagtgaggcccagg

SEQ ID NO: 1726 - DNA, 26 bp, Homo sapiens
ataggagaagaaagtgaggcccaggg

SEQ ID NO: 1727 - DNA, 26 bp, Homo sapiens
taggagaagaaagtgaggcccaggga

SEQ ID NO: 1728 - DNA, 26 bp, Homo sapiens
aggagaagaaagtgaggcccagggag

SEQ ID NO: 1729 - DNA, 26 bp, Homo sapiens
ggagaagaaagtgaggcccagggagg

SEQ ID NO: 1730 - DNA, 26 bp, Homo sapiens
gagaagaaagtgaggcccagggaggg

SEQ ID NO: 1731 - DNA, 26 bp, Homo sapiens
agaagaaagtgaggcccagggaggga

SEQ ID NO: 1732 - DNA, 26 bp, Homo sapiens
gaagaaagtgaggcccagggagggaa

SEQ ID NO: 1733 - DNA, 26 bp, Homo sapiens
aagaaagtgaggcccagggagggaaa

SEQ ID NO: 1734 - DNA, 26 bp, Homo sapiens
agaaagtgaggcccagggagggaaaa

SEQ ID NO: 1735 - DNA, 26 bp, Homo sapiens
gaaagtgaggcccagggagggaaaaa

SEQ ID NO: 1736 - DNA, 26 bp, Homo sapiens
aaagtgaggcccagggagggaaaaac

SEQ ID NO: 1737 - DNA, 26 bp, Homo sapiens
aagtgaggcccagggagggaaaaaca

SEQ ID NO: 1738 - DNA, 26 bp, Homo sapiens
agtgaggcccagggagggaaaaacaa

SEQ ID NO: 1739 - DNA, 26 bp, Homo sapiens
gtgaggcccagggagggaaaaacaac

SEQ ID NO: 1740 - DNA, 26 bp, Homo sapiens
tgaggcccagggagggaaaaacaact

SEQ ID NO: 1741 - DNA, 26 bp, Homo sapiens
gaggcccagggagggaaaaacaactg

SEQ ID NO: 1742 - DNA, 26 bp, Homo sapiens
aggcccagggagggaaaaacaactgc

SEQ ID NO: 1743 - DNA, 26 bp, Homo sapiens
ggcccagggagggaaaaacaactgct

SEQ ID NO: 1744 - DNA, 26 bp, Homo sapiens
gcccagggagggaaaaacaactgctc

SEQ ID NO: 1745 - DNA, 26 bp, Homo sapiens
cccagggagggaaaaacaactgctcc

SEQ ID NO: 1746 - DNA, 26 bp, Homo sapiens
ccagggagggaaaaacaactgctcca

SEQ ID NO: 1747 - DNA, 26 bp, Homo sapiens
cagggagggaaaaacaactgctccat

SEQ ID NO: 1748 - DNA, 26 bp, Homo sapiens
agggagggaaaaacaactgctccata

SEQ ID NO: 1749 - DNA, 26 bp, Homo sapiens
gggagggaaaaacaactgctccatat

SEQ ID NO: 1750 - DNA, 26 bp, Homo sapiens
ggagggaaaaacaactgctccatatc

SEQ ID NO: 1751 - DNA, 26 bp, Homo sapiens
gagggaaaaacaactgctccatatca

SEQ ID NO: 1752 - DNA, 26 bp, Homo sapiens
agggaaaaacaactgctccatatcat

SEQ ID NO: 1753 - DNA, 26 bp, Homo sapiens
gggaaaaacaactgctccatatcatt

SEQ ID NO: 1754 - DNA, 26 bp, Homo sapiens
ggaaaaacaactgctccatatcatta

SEQ ID NO: 1755 - DNA, 26 bp, Homo sapiens
gaaaaacaactgctccatatcattag

SEQ ID NO: 1756 - DNA, 26 bp, Homo sapiens
aaaaacaactgctccatatcattagc

SEQ ID NO: 1757 - DNA, 26 bp, Homo sapiens
aaaacaactgctccatatcattagcc

SEQ ID NO: 1758 - DNA, 26 bp, Homo sapiens
aaacaactgctccatatcattagcca

SEQ ID NO: 1759 - DNA, 26 bp, Homo sapiens
aacaactgctccatatcattagccaa

SEQ ID NO: 1760 - DNA, 26 bp, Homo sapiens
acaactgctccatatcattagccaag

SEQ ID NO: 1761 - DNA, 26 bp, Homo sapiens
caactgctccatatcattagccaagt

SEQ ID NO: 1762 - DNA, 26 bp, Homo sapiens
aactgctccatatcattagccaagta

SEQ ID NO: 1763 - DNA, 26 bp, Homo sapiens
actgctccatatcattagccaagtat

SEQ ID NO: 1764 - DNA, 26 bp, Homo sapiens
ctgctccatatcattagccaagtatg

SEQ ID NO: 1765 - DNA, 26 bp, Homo sapiens
tgctccatatcattagccaagtatga

SEQ ID NO: 1766 - DNA, 26 bp, Homo sapiens
gctccatatcattagccaagtatgag

SEQ ID NO: 1767 - DNA, 26 bp, Homo sapiens
ctccatatcattagccaagtatgagt

SEQ ID NO: 1768 - DNA, 26 bp, Homo sapiens
tccatatcattagccaagtatgagtt

SEQ ID NO: 1769 - DNA, 26 bp, Homo sapiens
ccatatcattagccaagtatgagttg

SEQ ID NO: 1770 - DNA, 26 bp, Homo sapiens
catatcattagccaagtatgagttgc

SEQ ID NO: 1771 - DNA, 26 bp, Homo sapiens
atatcattagccaagtatgagttgct

SEQ ID NO: 1772 - DNA, 26 bp, Homo sapiens
tatcattagccaagtatgagttgctg

SEQ ID NO: 1773 - DNA, 26 bp, Homo sapiens
atcattagccaagtatgagttgctgc

SEQ ID NO: 1774 - DNA, 26 bp, Homo sapiens
tcattagccaagtatgagttgctgct

SEQ ID NO: 1775 - DNA, 26 bp, Homo sapiens
cattagccaagtatgagttgctgctg

SEQ ID NO: 1776 - DNA, 26 bp, Homo sapiens
attagccaagtatgagttgctgctgc

SEQ ID NO: 1777 - DNA, 26 bp, Homo sapiens
ttagccaagtatgagttgctgctgct

SEQ ID NO: 1778 - DNA, 26 bp, Homo sapiens
tagccaagtatgagttgctgctgctg

SEQ ID NO: 1779 - DNA, 26 bp, Homo sapiens
agccaagtatgagttgctgctgctgc

SEQ ID NO: 1780 - DNA, 26 bp, Homo sapiens
gccaagtatgagttgctgctgctgcg

SEQ ID NO: 1781 - DNA, 26 bp, Homo sapiens
ccaagtatgagttgctgctgctgcga

SEQ ID NO: 1782 - DNA, 26 bp, Homo sapiens
caagtatgagttgctgctgctgcgag

SEQ ID NO: 1783 - DNA, 26 bp, Homo sapiens
aagtatgagttgctgctgctgcgagg

SEQ ID NO: 1784 - DNA, 26 bp, Homo sapiens
agtatgagttgctgctgctgcgaggg

SEQ ID NO: 1785 - DNA, 26 bp, Homo sapiens
gtatgagttgctgctgctgcgagggt

SEQ ID NO: 1786 - DNA, 26 bp, Homo sapiens
tatgagttgctgctgctgcgagggtc

SEQ ID NO: 1787 - DNA, 26 bp, Homo sapiens
atgagttgctgctgctgcgagggtct

SEQ ID NO: 1788 - DNA, 26 bp, Homo sapiens
tgagttgctgctgctgcgagggtctg

SEQ ID NO: 1789 - DNA, 26 bp, Homo sapiens
gagttgctgctgctgcgagggtctga

SEQ ID NO: 1790 - DNA, 26 bp, Homo sapiens
agttgctgctgctgcgagggtctgag

SEQ ID NO: 1791 - DNA, 26 bp, Homo sapiens
gttgctgctgctgcgagggtctgaga

SEQ ID NO: 1792 - DNA, 26 bp, Homo sapiens
ttgctgctgctgcgagggtctgagag

SEQ ID NO: 1793 - DNA, 26 bp, Homo sapiens
tgctgctgctgcgagggtctgagagg

SEQ ID NO: 1794 - DNA, 26 bp, Homo sapiens
gctgctgctgcgagggtctgagagga

SEQ ID NO: 1795 - DNA, 26 bp, Homo sapiens
ctgctgctgcgagggtctgagaggat

SEQ ID NO: 1796 - DNA, 26 bp, Homo sapiens
tgctgctgcgagggtctgagaggata

SEQ ID NO: 1797 - DNA, 26 bp, Homo sapiens
gctgctgcgagggtctgagaggatag

SEQ ID NO: 1798 - DNA, 26 bp, Homo sapiens
ctgctgcgagggtctgagaggataga

SEQ ID NO: 1799 - DNA, 26 bp, Homo sapiens
tgctgcgagggtctgagaggatagat

SEQ ID NO: 1800 - DNA, 26 bp, Homo sapiens
gctgcgagggtctgagaggatagata

SEQ ID NO: 1801 - DNA, 26 bp, Homo sapiens
ctgcgagggtctgagaggatagatat

SEQ ID NO: 1802 - DNA, 26 bp, Homo sapiens
tgcgagggtctgagaggatagatatg

SEQ ID NO: 1803 - DNA, 26 bp, Homo sapiens
gcgagggtctgagaggatagatatgt

SEQ ID NO: 1804 - DNA, 26 bp, Homo sapiens
cgagggtctgagaggatagatatgtt

SEQ ID NO: 1805 - DNA, 26 bp, Homo sapiens
gagggtctgagaggatagatatgttc

SEQ ID NO: 1806 - DNA, 26 bp, Homo sapiens
agggtctgagaggatagatatgttct

SEQ ID NO: 1807 - DNA, 26 bp, Homo sapiens
gggtctgagaggatagatatgttctc

SEQ ID NO: 1808 - DNA, 26 bp, Homo sapiens
ggtctgagaggatagatatgttctcc

SEQ ID NO: 1809 - DNA, 26 bp, Homo sapiens
gtctgagaggatagatatgttctccc

SEQ ID NO: 1810 - DNA, 26 bp, Homo sapiens
tctgagaggatagatatgttctccct

SEQ ID NO: 1811 - DNA, 26 bp, Homo sapiens
ctgagaggatagatatgttctccctt

SEQ ID NO: 1812 - DNA, 26 bp, Homo sapiens
tgagaggatagatatgttctcccttc

SEQ ID NO: 1813 - DNA, 26 bp, Homo sapiens
gagaggatagatatgttctcccttcc

SEQ ID NO: 1814 - DNA, 26 bp, Homo sapiens
agaggatagatatgttctcccttccc

SEQ ID NO: 1815 - DNA, 26 bp, Homo sapiens
gaggatagatatgttctcccttccca

SEQ ID NO: 1816 - DNA, 26 bp, Homo sapiens
aggatagatatgttctcccttcccat

SEQ ID NO: 1817 - DNA, 26 bp, Homo sapiens
ggatagatatgttctcccttcccatt

SEQ ID NO: 1818 - DNA, 26 bp, Homo sapiens
gatagatatgttctcccttcccattc

SEQ ID NO: 1819 - DNA, 26 bp, Homo sapiens
atagatatgttctcccttcccattca

SEQ ID NO: 1820 - DNA, 26 bp, Homo sapiens
tagatatgttctcccttcccattcat

SEQ ID NO: 1821 - DNA, 26 bp, Homo sapiens
agatatgttctcccttcccattcatt

SEQ ID NO: 1822 - DNA, 26 bp, Homo sapiens
gatatgttctcccttcccattcattc

SEQ ID NO: 1823 - DNA, 26 bp, Homo sapiens
atatgttctcccttcccattcattcc

SEQ ID NO: 1824 - DNA, 26 bp, Homo sapiens
tatgttctcccttcccattcattcct

SEQ ID NO: 1825 - DNA, 26 bp, Homo sapiens
atgttctcccttcccattcattcctc

SEQ ID NO: 1826 - DNA, 26 bp, Homo sapiens
tgttctcccttcccattcattcctcc

SEQ ID NO: 1827 - DNA, 26 bp, Homo sapiens
gttctcccttcccattcattcctcca

SEQ ID NO: 1828 - DNA, 26 bp, Homo sapiens
ttctcccttcccattcattcctccat

SEQ ID NO: 1829 - DNA, 26 bp, Homo sapiens
tctcccttcccattcattcctccatt

SEQ ID NO: 1830 - DNA, 26 bp, Homo sapiens
ctcccttcccattcattcctccattc

SEQ ID NO: 1831 - DNA, 26 bp, Homo sapiens
tcccttcccattcattcctccattcc

SEQ ID NO: 1832 - DNA, 26 bp, Homo sapiens
cccttcccattcattcctccattcct

SEQ ID NO: 1833 - DNA, 26 bp, Homo sapiens
ccttcccattcattcctccattcctt

SEQ ID NO: 1834 - DNA, 26 bp, Homo sapiens
cttcccattcattcctccattccttc

SEQ ID NO: 1835 - DNA, 26 bp, Homo sapiens
ttcccattcattcctccattccttcc

SEQ ID NO: 1836 - DNA, 26 bp, Homo sapiens
tcccattcattcctccattccttcct

SEQ ID NO: 1837 - DNA, 26 bp, Homo sapiens
cccattcattcctccattccttcctg

SEQ ID NO: 1838 - DNA, 26 bp, Homo sapiens
ccattcattcctccattccttcctgc

SEQ ID NO: 1839 - DNA, 26 bp, Homo sapiens
cattcattcctccattccttcctgca

SEQ ID NO: 1840 - DNA, 26 bp, Homo sapiens
attcattcctccattccttcctgcat

SEQ ID NO: 1841 - DNA, 26 bp, Homo sapiens
ttcattcctccattccttcctgcatc

SEQ ID NO: 1842 - DNA, 26 bp, Homo sapiens
tcattcctccattccttcctgcatcc

SEQ ID NO: 1843 - DNA, 26 bp, Homo sapiens
cattcctccattccttcctgcatcca

SEQ ID NO: 1844 - DNA, 26 bp, Homo sapiens
attcctccattccttcctgcatccat

SEQ ID NO: 1845 - DNA, 26 bp, Homo sapiens
ttcctccattccttcctgcatccatc

SEQ ID NO: 1846 - DNA, 26 bp, Homo sapiens
tcctccattccttcctgcatccatcc

SEQ ID NO: 1847 - DNA, 26 bp, Homo sapiens
cctccattccttcctgcatccatcca

SEQ ID NO: 1848 - DNA, 26 bp, Homo sapiens
ctccattccttcctgcatccatccag

SEQ ID NO: 1849 - DNA, 26 bp, Homo sapiens
tccattccttcctgcatccatccagc

SEQ ID NO: 1850 - DNA, 26 bp, Homo sapiens
ccattccttcctgcatccatccagca

SEQ ID NO: 1851 - DNA, 26 bp, Homo sapiens
cattccttcctgcatccatccagcat

SEQ ID NO: 1852 - DNA, 26 bp, Homo sapiens
attccttcctgcatccatccagcatt

SEQ ID NO: 1853 - DNA, 26 bp, Homo sapiens
ttccttcctgcatccatccagcattt

SEQ ID NO: 1854 - DNA, 26 bp, Homo sapiens
tccttcctgcatccatccagcattta

SEQ ID NO: 1855 - DNA, 26 bp, Homo sapiens
ccttcctgcatccatccagcatttat

SEQ ID NO: 1856 - DNA, 26 bp, Homo sapiens
cttcctgcatccatccagcatttatt

SEQ ID NO: 1857 - DNA, 26 bp, Homo sapiens
ttcctgcatccatccagcatttatta

SEQ ID NO: 1858 - DNA, 26 bp, Homo sapiens
tcctgcatccatccagcatttattaa

SEQ ID NO: 1859 - DNA, 26 bp, Homo sapiens
cctgcatccatccagcatttattaag

SEQ ID NO: 1860 - DNA, 26 bp, Homo sapiens
ctgcatccatccagcatttattaagc

SEQ ID NO: 1861 - DNA, 26 bp, Homo sapiens
tgcatccatccagcatttattaagca

SEQ ID NO: 1862 - DNA, 26 bp, Homo sapiens
gcatccatccagcatttattaagcac

SEQ ID NO: 1863 - DNA, 26 bp, Homo sapiens
catccatccagcatttattaagcacc

SEQ ID NO: 1864 - DNA, 26 bp, Homo sapiens
atccatccagcatttattaagcacct

SEQ ID NO: 1865 - DNA, 26 bp, Homo sapiens
tccatccagcatttattaagcaccta

SEQ ID NO: 1866 - DNA, 26 bp, Homo sapiens
ccatccagcatttattaagcacctac

SEQ ID NO: 1867 - DNA, 26 bp, Homo sapiens
catccagcatttattaagcacctact

SEQ ID NO: 1868 - DNA, 26 bp, Homo sapiens
atccagcatttattaagcacctactg

SEQ ID NO: 1869 - DNA, 26 bp, Homo sapiens
tccagcatttattaagcacctactgt

SEQ ID NO: 1870 - DNA, 26 bp, Homo sapiens
ccagcatttattaagcacctactgtg

SEQ ID NO: 1871 - DNA, 26 bp, Homo sapiens
cagcatttattaagcacctactgtgt

SEQ ID NO: 1872 - DNA, 26 bp, Homo sapiens
agcatttattaagcacctactgtgtg

SEQ ID NO: 1873 - DNA, 26 bp, Homo sapiens
gcatttattaagcacctactgtgtgc

SEQ ID NO: 1874 - DNA, 26 bp, Homo sapiens
catttattaagcacctactgtgtgcc

SEQ ID NO: 1875 - DNA, 26 bp, Homo sapiens
atttattaagcacctactgtgtgccc

SEQ ID NO: 1876 - DNA, 26 bp, Homo sapiens
tttattaagcacctactgtgtgcccc

SEQ ID NO: 1877 - DNA, 26 bp, Homo sapiens
ttattaagcacctactgtgtgcccca

SEQ ID NO: 1878 - DNA, 26 bp, Homo sapiens
tattaagcacctactgtgtgccccat

SEQ ID NO: 1879 - DNA, 26 bp, Homo sapiens
attaagcacctactgtgtgccccatt

SEQ ID NO: 1880 - DNA, 26 bp, Homo sapiens
ttaagcacctactgtgtgccccattc

SEQ ID NO: 1881 - DNA, 26 bp, Homo sapiens
taagcacctactgtgtgccccattct

SEQ ID NO: 1882 - DNA, 26 bp, Homo sapiens
aagcacctactgtgtgccccattctg

SEQ ID NO: 1883 - DNA, 26 bp, Homo sapiens
agcacctactgtgtgccccattctgt

SEQ ID NO: 1884 - DNA, 26 bp, Homo sapiens
gcacctactgtgtgccccattctgtg

SEQ ID NO: 1885 - DNA, 26 bp, Homo sapiens
cacctactgtgtgccccattctgtgc

SEQ ID NO: 1886 - DNA, 26 bp, Homo sapiens
acctactgtgtgccccattctgtgct

SEQ ID NO: 1887 - DNA, 26 bp, Homo sapiens
cctactgtgtgccccattctgtgcta

SEQ ID NO: 1888 - DNA, 26 bp, Homo sapiens
ctactgtgtgccccattctgtgctag

SEQ ID NO: 1889 - DNA, 26 bp, Homo sapiens
tactgtgtgccccattctgtgctaga

SEQ ID NO: 1890 - DNA, 26 bp, Homo sapiens
actgtgtgccccattctgtgctagac

SEQ ID NO: 1891 - DNA, 26 bp, Homo sapiens
ctgtgtgccccattctgtgctagaca

SEQ ID NO: 1892 - DNA, 26 bp, Homo sapiens
tgtgtgccccattctgtgctagacac

SEQ ID NO: 1893 - DNA, 26 bp, Homo sapiens
gtgtgccccattctgtgctagacact

SEQ ID NO: 1894 - DNA, 26 bp, Homo sapiens
tgtgccccattctgtgctagacactt

SEQ ID NO: 1895 - DNA, 26 bp, Homo sapiens
gtgccccattctgtgctagacactta

SEQ ID NO: 1896 - DNA, 26 bp, Homo sapiens
tgccccattctgtgctagacacttat

SEQ ID NO: 1897 - DNA, 26 bp, Homo sapiens
gccccattctgtgctagacacttatc

SEQ ID NO: 1898 - DNA, 26 bp, Homo sapiens
ccccattctgtgctagacacttatcc

SEQ ID NO: 1899 - DNA, 26 bp, Homo sapiens
cccattctgtgctagacacttatccc

SEQ ID NO: 1900 - DNA, 26 bp, Homo sapiens
ccattctgtgctagacacttatccct

SEQ ID NO: 1901 - DNA, 26 bp, Homo sapiens
cattctgtgctagacacttatcccta

SEQ ID NO: 1902 - DNA, 26 bp, Homo sapiens
attctgtgctagacacttatccctaa

SEQ ID NO: 1903 - DNA, 26 bp, Homo sapiens
ttctgtgctagacacttatccctaag

SEQ ID NO: 1904 - DNA, 26 bp, Homo sapiens
tctgtgctagacacttatccctaagc

SEQ ID NO: 1905 - DNA, 26 bp, Homo sapiens
ctgtgctagacacttatccctaagct

SEQ ID NO: 1906 - DNA, 26 bp, Homo sapiens
tgtgctagacacttatccctaagctg

SEQ ID NO: 1907 - DNA, 26 bp, Homo sapiens
gtgctagacacttatccctaagctgg

SEQ ID NO: 1908 - DNA, 26 bp, Homo sapiens
tgctagacacttatccctaagctggg

SEQ ID NO: 1909 - DNA, 26 bp, Homo sapiens
gctagacacttatccctaagctggga

SEQ ID NO: 1910 - DNA, 26 bp, Homo sapiens
ctagacacttatccctaagctgggac

SEQ ID NO: 1911 - DNA, 26 bp, Homo sapiens
tagacacttatccctaagctgggaca

SEQ ID NO: 1912 - DNA, 26 bp, Homo sapiens
agacacttatccctaagctgggacac

SEQ ID NO: 1913 - DNA, 26 bp, Homo sapiens
gacacttatccctaagctgggacact

SEQ ID NO: 1914 - DNA, 26 bp, Homo sapiens
acacttatccctaagctgggacactt

SEQ ID NO: 1915 - DNA, 26 bp, Homo sapiens
cacttatccctaagctgggacacttt

SEQ ID NO: 1916 - DNA, 26 bp, Homo sapiens
acttatccctaagctgggacactttt

SEQ ID NO: 1917 - DNA, 26 bp, Homo sapiens
cttatccctaagctgggacacttttc

SEQ ID NO: 1918 - DNA, 26 bp, Homo sapiens
ttatccctaagctgggacacttttcc

SEQ ID NO: 1919 - DNA, 26 bp, Homo sapiens
tatccctaagctgggacacttttcca

SEQ ID NO: 1920 - DNA, 26 bp, Homo sapiens
atccctaagctgggacacttttccag

SEQ ID NO: 1921 - DNA, 26 bp, Homo sapiens
tccctaagctgggacacttttccaga

SEQ ID NO: 1922 - DNA, 26 bp, Homo sapiens
ccctaagctgggacacttttccagaa

SEQ ID NO: 1923 - DNA, 26 bp, Homo sapiens
cctaagctgggacacttttccagaaa

SEQ ID NO: 1924 - DNA, 26 bp, Homo sapiens
ctaagctgggacacttttccagaaag

SEQ ID NO: 1925 - DNA, 26 bp, Homo sapiens
taagctgggacacttttccagaaagc

SEQ ID NO: 1926 - DNA, 26 bp, Homo sapiens
aagctgggacacttttccagaaagca

SEQ ID NO: 1927 - DNA, 26 bp, Homo sapiens
agctgggacacttttccagaaagcaa

SEQ ID NO: 1928 - DNA, 26 bp, Homo sapiens
gctgggacacttttccagaaagcaag

SEQ ID NO: 1929 - DNA, 26 bp, Homo sapiens
ctgggacacttttccagaaagcaaga

SEQ ID NO: 1930 - DNA, 26 bp, Homo sapiens
tgggacacttttccagaaagcaagaa

SEQ ID NO: 1931 - DNA, 26 bp, Homo sapiens
gggacacttttccagaaagcaagaat

SEQ ID NO: 1932 - DNA, 26 bp, Homo sapiens
ggacacttttccagaaagcaagaatc

SEQ ID NO: 1933 - DNA, 26 bp, Homo sapiens
gacacttttccagaaagcaagaatcc

SEQ ID NO: 1934 - DNA, 26 bp, Homo sapiens
acacttttccagaaagcaagaatcct

SEQ ID NO: 1935 - DNA, 26 bp, Homo sapiens
cacttttccagaaagcaagaatcctc

SEQ ID NO: 1936 - DNA, 26 bp, Homo sapiens
acttttccagaaagcaagaatcctcg

SEQ ID NO: 1937 - DNA, 26 bp, Homo sapiens
cttttccagaaagcaagaatcctcgt

SEQ ID NO: 1938 - DNA, 26 bp, Homo sapiens
ttttccagaaagcaagaatcctcgtg

SEQ ID NO: 1939 - DNA, 26 bp, Homo sapiens
tttccagaaagcaagaatcctcgtgt

SEQ ID NO: 1940 - DNA, 26 bp, Homo sapiens
ttccagaaagcaagaatcctcgtgtt

SEQ ID NO: 1941 - DNA, 26 bp, Homo sapiens
tccagaaagcaagaatcctcgtgttc

SEQ ID NO: 1942 - DNA, 26 bp, Homo sapiens
ccagaaagcaagaatcctcgtgttcc

SEQ ID NO: 1943 - DNA, 26 bp, Homo sapiens
cagaaagcaagaatcctcgtgttcct

SEQ ID NO: 1944 - DNA, 26 bp, Homo sapiens
agaaagcaagaatcctcgtgttcctg

SEQ ID NO: 1945 - DNA, 26 bp, Homo sapiens
gaaagcaagaatcctcgtgttcctga

SEQ ID NO: 1946 - DNA, 26 bp, Homo sapiens
aaagcaagaatcctcgtgttcctgaa

SEQ ID NO: 1947 - DNA, 26 bp, Homo sapiens
aagcaagaatcctcgtgttcctgaaa

SEQ ID NO: 1948 - DNA, 26 bp, Homo sapiens
agcaagaatcctcgtgttcctgaaag

SEQ ID NO: 1949 - DNA, 26 bp, Homo sapiens
gcaagaatcctcgtgttcctgaaaga

SEQ ID NO: 1950 - DNA, 26 bp, Homo sapiens
caagaatcctcgtgttcctgaaagat

SEQ ID NO: 1951 - DNA, 26 bp, Homo sapiens
aagaatcctcgtgttcctgaaagatg

SEQ ID NO: 1952 - DNA, 26 bp, Homo sapiens
agaatcctcgtgttcctgaaagatga

SEQ ID NO: 1953 - DNA, 26 bp, Homo sapiens
gaatcctcgtgttcctgaaagatgag

SEQ ID NO: 1954 - DNA, 26 bp, Homo sapiens
aatcctcgtgttcctgaaagatgagt

SEQ ID NO: 1955 - DNA, 26 bp, Homo sapiens
atcctcgtgttcctgaaagatgagtt

SEQ ID NO: 1956 - DNA, 26 bp, Homo sapiens
tcctcgtgttcctgaaagatgagttg

SEQ ID NO: 1957 - DNA, 26 bp, Homo sapiens
cctcgtgttcctgaaagatgagttgg

SEQ ID NO: 1958 - DNA, 26 bp, Homo sapiens
ctcgtgttcctgaaagatgagttggg

SEQ ID NO: 1959 - DNA, 26 bp, Homo sapiens
tcgtgttcctgaaagatgagttggga

SEQ ID NO: 1960 - DNA, 26 bp, Homo sapiens
cgtgttcctgaaagatgagttgggag

SEQ ID NO: 1961 - DNA, 26 bp, Homo sapiens
gtgttcctgaaagatgagttgggagg

SEQ ID NO: 1962 - DNA, 26 bp, Homo sapiens
tgttcctgaaagatgagttgggagga

SEQ ID NO: 1963 - DNA, 26 bp, Homo sapiens
gttcctgaaagatgagttgggaggag

SEQ ID NO: 1964 - DNA, 26 bp, Homo sapiens
ttcctgaaagatgagttgggaggagg

SEQ ID NO: 1965 - DNA, 26 bp, Homo sapiens
tcctgaaagatgagttgggaggagga

SEQ ID NO: 1966 - DNA, 26 bp, Homo sapiens
cctgaaagatgagttgggaggaggag

SEQ ID NO: 1967 - DNA, 26 bp, Homo sapiens
ctgaaagatgagttgggaggaggagg

SEQ ID NO: 1968 - DNA, 26 bp, Homo sapiens
tgaaagatgagttgggaggaggaggg

SEQ ID NO: 1969 - DNA, 26 bp, Homo sapiens
gaaagatgagttgggaggaggagggg

SEQ ID NO: 1970 - DNA, 26 bp, Homo sapiens
aaagatgagttgggaggaggaggggc

SEQ ID NO: 1971 - DNA, 26 bp, Homo sapiens
aagatgagttgggaggaggaggggca

SEQ ID NO: 1972 - DNA, 26 bp, Homo sapiens
agatgagttgggaggaggaggggcac

SEQ ID NO: 1973 - DNA, 26 bp, Homo sapiens
gatgagttgggaggaggaggggcaca

SEQ ID NO: 1974 - DNA, 26 bp, Homo sapiens
atgagttgggaggaggaggggcacac

SEQ ID NO: 1975 - DNA, 26 bp, Homo sapiens
tgagttgggaggaggaggggcacaca

SEQ ID NO: 1976 - DNA, 26 bp, Homo sapiens
gagttgggaggaggaggggcacacat

SEQ ID NO: 1977 - DNA, 26 bp, Homo sapiens
agttgggaggaggaggggcacacatc

SEQ ID NO: 1978 - DNA, 26 bp, Homo sapiens
gttgggaggaggaggggcacacatcc

SEQ ID NO: 1979 - DNA, 26 bp, Homo sapiens
ttgggaggaggaggggcacacatccc

SEQ ID NO: 1980 - DNA, 26 bp, Homo sapiens
tgggaggaggaggggcacacatcccg

SEQ ID NO: 1981 - DNA, 26 bp, Homo sapiens
gggaggaggaggggcacacatcccgc

SEQ ID NO: 1982 - DNA, 26 bp, Homo sapiens
ggaggaggaggggcacacatcccgct

SEQ ID NO: 1983 - DNA, 26 bp, Homo sapiens
gaggaggaggggcacacatcccgctg

SEQ ID NO: 1984 - DNA, 26 bp, Homo sapiens
aggaggaggggcacacatcccgctgg

SEQ ID NO: 1985 - DNA, 26 bp, Homo sapiens
ggaggaggggcacacatcccgctggc

SEQ ID NO: 1986 - DNA, 26 bp, Homo sapiens
gaggaggggcacacatcccgctggcc

SEQ ID NO: 1987 - DNA, 26 bp, Homo sapiens
aggaggggcacacatcccgctggcct

SEQ ID NO: 1988 - DNA, 26 bp, Homo sapiens
ggaggggcacacatcccgctggcctt

SEQ ID NO: 1989 - DNA, 26 bp, Homo sapiens
gaggggcacacatcccgctggccttg

SEQ ID NO: 1990 - DNA, 26 bp, Homo sapiens
aggggcacacatcccgctggccttgg

SEQ ID NO: 1991 - DNA, 26 bp, Homo sapiens
ggggcacacatcccgctggccttggg

SEQ ID NO: 1992 - DNA, 26 bp, Homo sapiens
gggcacacatcccgctggccttgggg

SEQ ID NO: 1993 - DNA, 26 bp, Homo sapiens
ggcacacatcccgctggccttgggga

SEQ ID NO: 1994 - DNA, 26 bp, Homo sapiens
gcacacatcccgctggccttggggaa

SEQ ID NO: 1995 - DNA, 26 bp, Homo sapiens
cacacatcccgctggccttggggaac

SEQ ID NO: 1996 - DNA, 26 bp, Homo sapiens
acacatcccgctggccttggggaacg

SEQ ID NO: 1997 - DNA, 26 bp, Homo sapiens
cacatcccgctggccttggggaacgt

SEQ ID NO: 1998 - DNA, 26 bp, Homo sapiens
acatcccgctggccttggggaacgtg

SEQ ID NO: 1999 - DNA, 26 bp, Homo sapiens
catcccgctggccttggggaacgtgg

SEQ ID NO: 2000 - DNA, 26 bp, Homo sapiens
atcccgctggccttggggaacgtggg

SEQ ID NO: 2001 - DNA, 26 bp, Homo sapiens
tcccgctggccttggggaacgtggga

SEQ ID NO: 2002 - DNA, 26 bp, Homo sapiens
cccgctggccttggggaacgtgggac

SEQ ID NO: 2003 - DNA, 26 bp, Homo sapiens
ccgctggccttggggaacgtgggact

SEQ ID NO: 2004 - DNA, 26 bp, Homo sapiens
cgctggccttggggaacgtgggactc

SEQ ID NO: 2005 - DNA, 26 bp, Homo sapiens
gctggccttggggaacgtgggactcc

SEQ ID NO: 2006 - DNA, 26 bp, Homo sapiens
ctggccttggggaacgtgggactcca

SEQ ID NO: 2007 - DNA, 26 bp, Homo sapiens
tggccttggggaacgtgggactccag

SEQ ID NO: 2008 - DNA, 26 bp, Homo sapiens
ggccttggggaacgtgggactccaga

SEQ ID NO: 2009 - DNA, 26 bp, Homo sapiens
gccttggggaacgtgggactccagat

SEQ ID NO: 2010 - DNA, 26 bp, Homo sapiens
ccttggggaacgtgggactccagatc

SEQ ID NO: 2011 - DNA, 26 bp, Homo sapiens
cttggggaacgtgggactccagatca

SEQ ID NO: 2012 - DNA, 26 bp, Homo sapiens
ttggggaacgtgggactccagatcag

SEQ ID NO: 2013 - DNA, 26 bp, Homo sapiens
tggggaacgtgggactccagatcagt

SEQ ID NO: 2014 - DNA, 26 bp, Homo sapiens
ggggaacgtgggactccagatcagta

SEQ ID NO: 2015 - DNA, 26 bp, Homo sapiens
gggaacgtgggactccagatcagtag

SEQ ID NO: 2016 - DNA, 26 bp, Homo sapiens
ggaacgtgggactccagatcagtagg

SEQ ID NO: 2017 - DNA, 26 bp, Homo sapiens
gaacgtgggactccagatcagtaggt

SEQ ID NO: 2018 - DNA, 26 bp, Homo sapiens
aacgtgggactccagatcagtaggtc

SEQ ID NO: 2019 - DNA, 26 bp, Homo sapiens
acgtgggactccagatcagtaggtct

SEQ ID NO: 2020 - DNA, 26 bp, Homo sapiens
cgtgggactccagatcagtaggtctt

SEQ ID NO: 2021 - DNA, 26 bp, Homo sapiens
gtgggactccagatcagtaggtcttg

SEQ ID NO: 2022 - DNA, 26 bp, Homo sapiens
tgggactccagatcagtaggtcttgg

SEQ ID NO: 2023 - DNA, 26 bp, Homo sapiens
gggactccagatcagtaggtcttggt

SEQ ID NO: 2024 - DNA, 26 bp, Homo sapiens
ggactccagatcagtaggtcttggtg

SEQ ID NO: 2025 - DNA, 26 bp, Homo sapiens
gactccagatcagtaggtcttggtgg

SEQ ID NO: 2026 - DNA, 26 bp, Homo sapiens
actccagatcagtaggtcttggtgga

SEQ ID NO: 2027 - DNA, 26 bp, Homo sapiens
ctccagatcagtaggtcttggtggat

SEQ ID NO: 2028 - DNA, 26 bp, Homo sapiens
tccagatcagtaggtcttggtggatg

SEQ ID NO: 2029 - DNA, 26 bp, Homo sapiens
ccagatcagtaggtcttggtggatgt

SEQ ID NO: 2030 - DNA, 26 bp, Homo sapiens
cagatcagtaggtcttggtggatgtc

SEQ ID NO: 2031 - DNA, 26 bp, Homo sapiens
agatcagtaggtcttggtggatgtcc

SEQ ID NO: 2032 - DNA, 26 bp, Homo sapiens
gatcagtaggtcttggtggatgtccc

SEQ ID NO: 2033 - DNA, 26 bp, Homo sapiens
atcagtaggtcttggtggatgtccct

SEQ ID NO: 2034 - DNA, 26 bp, Homo sapiens
tcagtaggtcttggtggatgtccctt

SEQ ID NO: 2035 - DNA, 26 bp, Homo sapiens
cagtaggtcttggtggatgtcccttc

SEQ ID NO: 2036 - DNA, 26 bp, Homo sapiens
agtaggtcttggtggatgtcccttct

SEQ ID NO: 2037 - DNA, 26 bp, Homo sapiens
gtaggtcttggtggatgtcccttctc

SEQ ID NO: 2038 - DNA, 26 bp, Homo sapiens
taggtcttggtggatgtcccttctca

SEQ ID NO: 2039 - DNA, 26 bp, Homo sapiens
aggtcttggtggatgtcccttctcag

SEQ ID NO: 2040 - DNA, 26 bp, Homo sapiens
ggtcttggtggatgtcccttctcagg

SEQ ID NO: 2041 - DNA, 26 bp, Homo sapiens
gtcttggtggatgtcccttctcaggc

SEQ ID NO: 2042 - DNA, 26 bp, Homo sapiens
tcttggtggatgtcccttctcaggct

SEQ ID NO: 2043 - DNA, 26 bp, Homo sapiens
cttggtggatgtcccttctcaggctg

SEQ ID NO: 2044 - DNA, 26 bp, Homo sapiens
ttggtggatgtcccttctcaggctgt

SEQ ID NO: 2045 - DNA, 26 bp, Homo sapiens
tggtggatgtcccttctcaggctgtc

SEQ ID NO: 2046 - DNA, 26 bp, Homo sapiens
ggtggatgtcccttctcaggctgtcc

SEQ ID NO: 2047 - DNA, 26 bp, Homo sapiens
gtggatgtcccttctcaggctgtccc

SEQ ID NO: 2048 - DNA, 26 bp, Homo sapiens
tggatgtcccttctcaggctgtccca

SEQ ID NO: 2049 - DNA, 26 bp, Homo sapiens
ggatgtcccttctcaggctgtcccag

SEQ ID NO: 2050 - DNA, 26 bp, Homo sapiens
gatgtcccttctcaggctgtcccagg

SEQ ID NO: 2051 - DNA, 26 bp, Homo sapiens
atgtcccttctcaggctgtcccaggt

SEQ ID NO: 2052 - DNA, 26 bp, Homo sapiens
tgtcccttctcaggctgtcccaggtg

SEQ ID NO: 2053 - DNA, 26 bp, Homo sapiens
gtcccttctcaggctgtcccaggtga

SEQ ID NO: 2054 - DNA, 26 bp, Homo sapiens
tcccttctcaggctgtcccaggtgag

SEQ ID NO: 2055 - DNA, 26 bp, Homo sapiens
cccttctcaggctgtcccaggtgagt

SEQ ID NO: 2056 - DNA, 26 bp, Homo sapiens
ccttctcaggctgtcccaggtgagtg

SEQ ID NO: 2057 - DNA, 26 bp, Homo sapiens
cttctcaggctgtcccaggtgagtga

SEQ ID NO: 2058 - DNA, 26 bp, Homo sapiens
ttctcaggctgtcccaggtgagtgag

SEQ ID NO: 2059 - DNA, 26 bp, Homo sapiens
tctcaggctgtcccaggtgagtgagg

SEQ ID NO: 2060 - DNA, 26 bp, Homo sapiens
ctcaggctgtcccaggtgagtgagga

SEQ ID NO: 2061 - DNA, 26 bp, Homo sapiens
tcaggctgtcccaggtgagtgaggag

SEQ ID NO: 2062 - DNA, 26 bp, Homo sapiens
caggctgtcccaggtgagtgaggagc

SEQ ID NO: 2063 - DNA, 26 bp, Homo sapiens
aggctgtcccaggtgagtgaggagcc

SEQ ID NO: 2064 - DNA, 26 bp, Homo sapiens
ggctgtcccaggtgagtgaggagcct

SEQ ID NO: 2065 - DNA, 26 bp, Homo sapiens
gctgtcccaggtgagtgaggagcctc

SEQ ID NO: 2066 - DNA, 26 bp, Homo sapiens
ctgtcccaggtgagtgaggagcctca

SEQ ID NO: 2067 - DNA, 26 bp, Homo sapiens
tgtcccaggtgagtgaggagcctcat

SEQ ID NO: 2068 - DNA, 26 bp, Homo sapiens
gtcccaggtgagtgaggagcctcatt

SEQ ID NO: 2069 - DNA, 26 bp, Homo sapiens
tcccaggtgagtgaggagcctcatta

SEQ ID NO: 2070 - DNA, 26 bp, Homo sapiens
cccaggtgagtgaggagcctcattaa

SEQ ID NO: 2071 - DNA, 26 bp, Homo sapiens
ccaggtgagtgaggagcctcattaat

SEQ ID NO: 2072 - DNA, 26 bp, Homo sapiens
caggtgagtgaggagcctcattaatt

SEQ ID NO: 2073 - DNA, 26 bp, Homo sapiens
aggtgagtgaggagcctcattaatta

SEQ ID NO: 2074 - DNA, 26 bp, Homo sapiens
ggtgagtgaggagcctcattaattat

SEQ ID NO: 2075 - DNA, 26 bp, Homo sapiens
gtgagtgaggagcctcattaattatt

SEQ ID NO: 2076 - DNA, 26 bp, Homo sapiens
tgagtgaggagcctcattaattattt

SEQ ID NO: 2077 - DNA, 26 bp, Homo sapiens
gagtgaggagcctcattaattatttc

SEQ ID NO: 2078 - DNA, 26 bp, Homo sapiens
agtgaggagcctcattaattatttct

SEQ ID NO: 2079 - DNA, 26 bp, Homo sapiens
gtgaggagcctcattaattatttctt

SEQ ID NO: 2080 - DNA, 26 bp, Homo sapiens
tgaggagcctcattaattatttctta

SEQ ID NO: 2081 - DNA, 26 bp, Homo sapiens
gaggagcctcattaattatttcttaa

SEQ ID NO: 2082 - DNA, 26 bp, Homo sapiens
aggagcctcattaattatttcttaaa

SEQ ID NO: 2083 - DNA, 26 bp, Homo sapiens
ggagcctcattaattatttcttaaaa

SEQ ID NO: 2084 - DNA, 26 bp, Homo sapiens
gagcctcattaattatttcttaaaaa

SEQ ID NO: 2085 - DNA, 26 bp, Homo sapiens
agcctcattaattatttcttaaaaaa

SEQ ID NO: 2086 - DNA, 26 bp, Homo sapiens
gcctcattaattatttcttaaaaaaa

SEQ ID NO: 2087 - DNA, 26 bp, Homo sapiens
cctcattaattatttcttaaaaaaaa

SEQ ID NO: 2088 - DNA, 26 bp, Homo sapiens
ctcattaattatttcttaaaaaaaaa

SEQ ID NO: 2089 - DNA, 26 bp, Homo sapiens
tcattaattatttcttaaaaaaaaaa

SEQ ID NO: 2090 - DNA, 26 bp, Homo sapiens
cattaattatttcttaaaaaaaaaaa

SEQ ID NO: 2091 - DNA, 26 bp, Homo sapiens
attaattatttcttaaaaaaaaaaaa

SEQ ID NO: 2092 - DNA, 26 bp, Homo sapiens
ttaattatttcttaaaaaaaaaaaaa

SEQ ID NO: 2093 - DNA, 26 bp, Homo sapiens
taattatttcttaaaaaaaaaaaaaa

SEQ ID NO: 2094 - DNA, 26 bp, Homo sapiens
aattatttcttaaaaaaaaaaaaaaa

SEQ ID NO: 2095 - DNA, 26 bp, Homo sapiens
attatttcttaaaaaaaaaaaaaaaa

SEQ ID NO: 2096 - DNA, 26 bp, Homo sapiens
ttatttcttaaaaaaaaaaaaaaaat

SEQ ID NO: 2097 - DNA, 26 bp, Homo sapiens
tatttcttaaaaaaaaaaaaaaaatt

SEQ ID NO: 2098 - DNA, 26 bp, Homo sapiens
atttcttaaaaaaaaaaaaaaaatta

SEQ ID NO: 2099 - DNA, 26 bp, Homo sapiens
tttcttaaaaaaaaaaaaaaaattaa

SEQ ID NO: 2100 - DNA, 26 bp, Homo sapiens
ttcttaaaaaaaaaaaaaaaattaag

SEQ ID NO: 2101 - DNA, 26 bp, Homo sapiens
tcttaaaaaaaaaaaaaaaattaagg

SEQ ID NO: 2102 - DNA, 26 bp, Homo sapiens
cttaaaaaaaaaaaaaaaattaagga

SEQ ID NO: 2103 - DNA, 26 bp, Homo sapiens
ttaaaaaaaaaaaaaaaattaaggag

SEQ ID NO: 2104 - DNA, 26 bp, Homo sapiens
taaaaaaaaaaaaaaaattaaggagc

SEQ ID NO: 2105 - DNA, 26 bp, Homo sapiens
aaaaaaaaaaaaaaaattaaggagcc

SEQ ID NO: 2106 - DNA, 26 bp, Homo sapiens
aaaaaaaaaaaaaaattaaggagcct

SEQ ID NO: 2107 - DNA, 26 bp, Homo sapiens
aaaaaaaaaaaaaattaaggagccta

SEQ ID NO: 2108 - DNA, 26 bp, Homo sapiens
aaaaaaaaaaaaattaaggagcctat

SEQ ID NO: 2109 - DNA, 26 bp, Homo sapiens
aaaaaaaaaaaattaaggagcctatg

SEQ ID NO: 2110 - DNA, 26 bp, Homo sapiens
aaaaaaaaaaattaaggagcctatgt

SEQ ID NO: 2111 - DNA, 26 bp, Homo sapiens
aaaaaaaaaattaaggagcctatgtg

SEQ ID NO: 2112 - DNA, 26 bp, Homo sapiens
aaaaaaaaattaaggagcctatgtga

SEQ ID NO: 2113 - DNA, 26 bp, Homo sapiens
aaaaaaaattaaggagcctatgtgac

SEQ ID NO: 2114 - DNA, 26 bp, Homo sapiens
aaaaaaattaaggagcctatgtgact

SEQ ID NO: 2115 - DNA, 26 bp, Homo sapiens
aaaaaattaaggagcctatgtgactt

SEQ ID NO: 2116 - DNA, 26 bp, Homo sapiens
aaaaattaaggagcctatgtgacttc

SEQ ID NO: 2117 - DNA, 26 bp, Homo sapiens
aaaattaaggagcctatgtgacttcg

SEQ ID NO: 2118 - DNA, 26 bp, Homo sapiens
aaattaaggagcctatgtgacttcgt

SEQ ID NO: 2119 - DNA, 26 bp, Homo sapiens
aattaaggagcctatgtgacttcgtt

SEQ ID NO: 2120 - DNA, 26 bp, Homo sapiens
attaaggagcctatgtgacttcgttc

SEQ ID NO: 2121 - DNA, 26 bp, Homo sapiens
ttaaggagcctatgtgacttcgttca

SEQ ID NO: 2122 - DNA, 26 bp, Homo sapiens
taaggagcctatgtgacttcgttcat

SEQ ID NO: 2123 - DNA, 26 bp, Homo sapiens
aaggagcctatgtgacttcgttcatt

SEQ ID NO: 2124 - DNA, 26 bp, Homo sapiens
aggagcctatgtgacttcgttcattc

SEQ ID NO: 2125 - DNA, 26 bp, Homo sapiens
ggagcctatgtgacttcgttcattct

SEQ ID NO: 2126 - DNA, 26 bp, Homo sapiens
gagcctatgtgacttcgttcattctg

SEQ ID NO: 2127 - DNA, 26 bp, Homo sapiens
agcctatgtgacttcgttcattctgc

SEQ ID NO: 2128 - DNA, 26 bp, Homo sapiens
gcctatgtgacttcgttcattctgca

SEQ ID NO: 2129 - DNA, 26 bp, Homo sapiens
cctatgtgacttcgttcattctgcac

SEQ ID NO: 2130 - DNA, 26 bp, Homo sapiens
ctatgtgacttcgttcattctgcaca

SEQ ID NO: 2131 - DNA, 26 bp, Homo sapiens
tatgtgacttcgttcattctgcacag

SEQ ID NO: 2132 - DNA, 26 bp, Homo sapiens
atgtgacttcgttcattctgcacagg

SEQ ID NO: 2133 - DNA, 26 bp, Homo sapiens
tgtgacttcgttcattctgcacaggc

SEQ ID NO: 2134 - DNA, 26 bp, Homo sapiens
gtgacttcgttcattctgcacaggcg

SEQ ID NO: 2135 - DNA, 26 bp, Homo sapiens
tgacttcgttcattctgcacaggcgc

SEQ ID NO: 2136 - DNA, 26 bp, Homo sapiens
gacttcgttcattctgcacaggcgct

SEQ ID NO: 2137 - DNA, 26 bp, Homo sapiens
acttcgttcattctgcacaggcgctg

SEQ ID NO: 2138 - DNA, 26 bp, Homo sapiens
cttcgttcattctgcacaggcgctgc

SEQ ID NO: 2139 - DNA, 26 bp, Homo sapiens
ttcgttcattctgcacaggcgctgct

SEQ ID NO: 2140 - DNA, 26 bp, Homo sapiens
tcgttcattctgcacaggcgctgctc

SEQ ID NO: 2141 - DNA, 26 bp, Homo sapiens
cgttcattctgcacaggcgctgctcc

SEQ ID NO: 2142 - DNA, 26 bp, Homo sapiens
gttcattctgcacaggcgctgctcct

SEQ ID NO: 2143 - DNA, 26 bp, Homo sapiens
ttcattctgcacaggcgctgctcctg

SEQ ID NO: 2144 - DNA, 26 bp, Homo sapiens
tcattctgcacaggcgctgctcctgg

SEQ ID NO: 2145 - DNA, 26 bp, Homo sapiens
cattctgcacaggcgctgctcctggt

SEQ ID NO: 2146 - DNA, 26 bp, Homo sapiens
attctgcacaggcgctgctcctggtg

SEQ ID NO: 2147 - DNA, 26 bp, Homo sapiens
ttctgcacaggcgctgctcctggtgg

SEQ ID NO: 2148 - DNA, 26 bp, Homo sapiens
tctgcacaggcgctgctcctggtggg

SEQ ID NO: 2149 - DNA, 26 bp, Homo sapiens
ctgcacaggcgctgctcctggtggga

SEQ ID NO: 2150 - DNA, 26 bp, Homo sapiens
tgcacaggcgctgctcctggtgggat

SEQ ID NO: 2151 - DNA, 26 bp, Homo sapiens
gcacaggcgctgctcctggtgggatg

SEQ ID NO: 2152 - DNA, 26 bp, Homo sapiens
cacaggcgctgctcctggtgggatgg

SEQ ID NO: 2153 - DNA, 26 bp, Homo sapiens
acaggcgctgctcctggtgggatggc

SEQ ID NO: 2154 - DNA, 26 bp, Homo sapiens
caggcgctgctcctggtgggatggct

SEQ ID NO: 2155 - DNA, 26 bp, Homo sapiens
aggcgctgctcctggtgggatggctg

SEQ ID NO: 2156 - DNA, 26 bp, Homo sapiens
ggcgctgctcctggtgggatggctgt

SEQ ID NO: 2157 - DNA, 26 bp, Homo sapiens
gcgctgctcctggtgggatggctgtg

SEQ ID NO: 2158 - DNA, 26 bp, Homo sapiens
cgctgctcctggtgggatggctgtgg

SEQ ID NO: 2159 - DNA, 26 bp, Homo sapiens
gctgctcctggtgggatggctgtggc

SEQ ID NO: 2160 - DNA, 26 bp, Homo sapiens
ctgctcctggtgggatggctgtggct

SEQ ID NO: 2161 - DNA, 26 bp, Homo sapiens
tgctcctggtgggatggctgtggctg

SEQ ID NO: 2162 - DNA, 26 bp, Homo sapiens
gctcctggtgggatggctgtggctgg

SEQ ID NO: 2163 - DNA, 26 bp, Homo sapiens
ctcctggtgggatggctgtggctggg

SEQ ID NO: 2164 - DNA, 26 bp, Homo sapiens
tcctggtgggatggctgtggctgggg

SEQ ID NO: 2165 - DNA, 26 bp, Homo sapiens
cctggtgggatggctgtggctggggg

SEQ ID NO: 2166 - DNA, 26 bp, Homo sapiens
ctggtgggatggctgtggctggggga

SEQ ID NO: 2167 - DNA, 26 bp, Homo sapiens
tggtgggatggctgtggctgggggaa

SEQ ID NO: 2168 - DNA, 26 bp, Homo sapiens
ggtgggatggctgtggctgggggaag

SEQ ID NO: 2169 - DNA, 26 bp, Homo sapiens
gtgggatggctgtggctgggggaagg

SEQ ID NO: 2170 - DNA, 26 bp, Homo sapiens
tgggatggctgtggctgggggaaggt

SEQ ID NO: 2171 - DNA, 26 bp, Homo sapiens
gggatggctgtggctgggggaaggtg

SEQ ID NO: 2172 - DNA, 26 bp, Homo sapiens
ggatggctgtggctgggggaaggtgt

SEQ ID NO: 2173 - DNA, 26 bp, Homo sapiens
gatggctgtggctgggggaaggtgta

SEQ ID NO: 2174 - DNA, 26 bp, Homo sapiens
atggctgtggctgggggaaggtgtag

SEQ ID NO: 2175 - DNA, 26 bp, Homo sapiens
tggctgtggctgggggaaggtgtagg

SEQ ID NO: 2176 - DNA, 26 bp, Homo sapiens
ggctgtggctgggggaaggtgtaggg

SEQ ID NO: 2177 - DNA, 26 bp, Homo sapiens
gctgtggctgggggaaggtgtagggg

SEQ ID NO: 2178 - DNA, 26 bp, Homo sapiens
ctgtggctgggggaaggtgtagggga

SEQ ID NO: 2179 - DNA, 26 bp, Homo sapiens
tgtggctgggggaaggtgtaggggat

SEQ ID NO: 2180 - DNA, 26 bp, Homo sapiens
gtggctgggggaaggtgtaggggatg

SEQ ID NO: 2181 - DNA, 26 bp, Homo sapiens
tggctgggggaaggtgtaggggatgg

SEQ ID NO: 2182 - DNA, 26 bp, Homo sapiens
ggctgggggaaggtgtaggggatggg

SEQ ID NO: 2183 - DNA, 26 bp, Homo sapiens
gctgggggaaggtgtaggggatggga

SEQ ID NO: 2184 - DNA, 26 bp, Homo sapiens
ctgggggaaggtgtaggggatgggag

SEQ ID NO: 2185 - DNA, 26 bp, Homo sapiens
tgggggaaggtgtaggggatgggaga

SEQ ID NO: 2186 - DNA, 26 bp, Homo sapiens
gggggaaggtgtaggggatgggagac

SEQ ID NO: 2187 - DNA, 26 bp, Homo sapiens
ggggaaggtgtaggggatgggagacg

SEQ ID NO: 2188 - DNA, 26 bp, Homo sapiens
gggaaggtgtaggggatgggagacgc

SEQ ID NO: 2189 - DNA, 26 bp, Homo sapiens
ggaaggtgtaggggatgggagacgcc

SEQ ID NO: 2190 - DNA, 26 bp, Homo sapiens
gaaggtgtaggggatgggagacgcct

SEQ ID NO: 2191 - DNA, 26 bp, Homo sapiens
aaggtgtaggggatgggagacgccta

SEQ ID NO: 2192 - DNA, 26 bp, Homo sapiens
aggtgtaggggatgggagacgcctat

SEQ ID NO: 2193 - DNA, 26 bp, Homo sapiens
ggtgtaggggatgggagacgcctata

SEQ ID NO: 2194 - DNA, 26 bp, Homo sapiens
gtgtaggggatgggagacgcctatag

SEQ ID NO: 2195 - DNA, 26 bp, Homo sapiens
tgtaggggatgggagacgcctatagt

SEQ ID NO: 2196 - DNA, 26 bp, Homo sapiens
gtaggggatgggagacgcctatagtc

SEQ ID NO: 2197 - DNA, 26 bp, Homo sapiens
taggggatgggagacgcctatagtcg

SEQ ID NO: 2198 - DNA, 26 bp, Homo sapiens
aggggatgggagacgcctatagtcgg

SEQ ID NO: 2199 - DNA, 26 bp, Homo sapiens
ggggatgggagacgcctatagtcggc

SEQ ID NO: 2200 - DNA, 26 bp, Homo sapiens
gggatgggagacgcctatagtcggcc

SEQ ID NO: 2201 - DNA, 26 bp, Homo sapiens
ggatgggagacgcctatagtcggcca

SEQ ID NO: 2202 - DNA, 26 bp, Homo sapiens
gatgggagacgcctatagtcggccac

SEQ ID NO: 2203 - DNA, 26 bp, Homo sapiens
atgggagacgcctatagtcggccaca

SEQ ID NO: 2204 - DNA, 26 bp, Homo sapiens
tgggagacgcctatagtcggccacag

SEQ ID NO: 2205 - DNA, 26 bp, Homo sapiens
gggagacgcctatagtcggccacaga

SEQ ID NO: 2206 - DNA, 26 bp, Homo sapiens
ggagacgcctatagtcggccacagag

SEQ ID NO: 2207 - DNA, 26 bp, Homo sapiens
gagacgcctatagtcggccacagagt

SEQ ID NO: 2208 - DNA, 26 bp, Homo sapiens
agacgcctatagtcggccacagagtc

SEQ ID NO: 2209 - DNA, 26 bp, Homo sapiens
gacgcctatagtcggccacagagtcc

SEQ ID NO: 2210 - DNA, 26 bp, Homo sapiens
acgcctatagtcggccacagagtcct

SEQ ID NO: 2211 - DNA, 26 bp, Homo sapiens
cgcctatagtcggccacagagtccta

SEQ ID NO: 2212 - DNA, 26 bp, Homo sapiens
gcctatagtcggccacagagtcctag

SEQ ID NO: 2213 - DNA, 26 bp, Homo sapiens
cctatagtcggccacagagtcctagg

SEQ ID NO: 2214 - DNA, 26 bp, Homo sapiens
ctatagtcggccacagagtcctaggc

SEQ ID NO: 2215 - DNA, 26 bp, Homo sapiens
tatagtcggccacagagtcctaggca

SEQ ID NO: 2216 - DNA, 26 bp, Homo sapiens
atagtcggccacagagtcctaggcag

SEQ ID NO: 2217 - DNA, 26 bp, Homo sapiens
tagtcggccacagagtcctaggcagg

SEQ ID NO: 2218 - DNA, 26 bp, Homo sapiens
agtcggccacagagtcctaggcaggt

SEQ ID NO: 2219 - DNA, 26 bp, Homo sapiens
gtcggccacagagtcctaggcaggtc

SEQ ID NO: 2220 - DNA, 26 bp, Homo sapiens
tcggccacagagtcctaggcaggtct

SEQ ID NO: 2221 - DNA, 26 bp, Homo sapiens
cggccacagagtcctaggcaggtctt

SEQ ID NO: 2222 - DNA, 26 bp, Homo sapiens
ggccacagagtcctaggcaggtctta

SEQ ID NO: 2223 - DNA, 26 bp, Homo sapiens
gccacagagtcctaggcaggtcttag

SEQ ID NO: 2224 - DNA, 26 bp, Homo sapiens
ccacagagtcctaggcaggtcttagg

SEQ ID NO: 2225 - DNA, 26 bp, Homo sapiens
cacagagtcctaggcaggtcttaggc

SEQ ID NO: 2226 - DNA, 26 bp, Homo sapiens
acagagtcctaggcaggtcttaggcc

SEQ ID NO: 2227 - DNA, 26 bp, Homo sapiens
cagagtcctaggcaggtcttaggccg

SEQ ID NO: 2228 - DNA, 26 bp, Homo sapiens
agagtcctaggcaggtcttaggccgg

SEQ ID NO: 2229 - DNA, 26 bp, Homo sapiens
gagtcctaggcaggtcttaggccggg

SEQ ID NO: 2230 - DNA, 26 bp, Homo sapiens
agtcctaggcaggtcttaggccgggg

SEQ ID NO: 2231 - DNA, 26 bp, Homo sapiens
gtcctaggcaggtcttaggccggggc

SEQ ID NO: 2232 - DNA, 26 bp, Homo sapiens
tcctaggcaggtcttaggccggggcc

SEQ ID NO: 2233 - DNA, 26 bp, Homo sapiens
cctaggcaggtcttaggccggggcca

SEQ ID NO: 2234 - DNA, 26 bp, Homo sapiens
ctaggcaggtcttaggccggggccac

SEQ ID NO: 2235 - DNA, 26 bp, Homo sapiens
taggcaggtcttaggccggggccacc

SEQ ID NO: 2236 - DNA, 26 bp, Homo sapiens
aggcaggtcttaggccggggccacct

SEQ ID NO: 2237 - DNA, 26 bp, Homo sapiens
ggcaggtcttaggccggggccacctg

SEQ ID NO: 2238 - DNA, 26 bp, Homo sapiens
gcaggtcttaggccggggccacctgg

SEQ ID NO: 2239 - DNA, 26 bp, Homo sapiens
caggtcttaggccggggccacctggc

SEQ ID NO: 2240 - DNA, 26 bp, Homo sapiens
aggtcttaggccggggccacctggct

SEQ ID NO: 2241 - DNA, 26 bp, Homo sapiens
ggtcttaggccggggccacctggctc

SEQ ID NO: 2242 - DNA, 26 bp, Homo sapiens
gtcttaggccggggccacctggctcg

SEQ ID NO: 2243 - DNA, 26 bp, Homo sapiens
tcttaggccggggccacctggctcgt

SEQ ID NO: 2244 - DNA, 26 bp, Homo sapiens
cttaggccggggccacctggctcgtc

SEQ ID NO: 2245 - DNA, 26 bp, Homo sapiens
ttaggccggggccacctggctcgtct

SEQ ID NO: 2246 - DNA, 26 bp, Homo sapiens
taggccggggccacctggctcgtctc

SEQ ID NO: 2247 - DNA, 26 bp, Homo sapiens
aggccggggccacctggctcgtctcc

SEQ ID NO: 2248 - DNA, 26 bp, Homo sapiens
ggccggggccacctggctcgtctccg

SEQ ID NO: 2249 - DNA, 26 bp, Homo sapiens
gccggggccacctggctcgtctccgt

SEQ ID NO: 2250 - DNA, 26 bp, Homo sapiens
ccggggccacctggctcgtctccgtc

SEQ ID NO: 2251 - DNA, 26 bp, Homo sapiens
cggggccacctggctcgtctccgtct

SEQ ID NO: 2252 - DNA, 26 bp, Homo sapiens
ggggccacctggctcgtctccgtctt

SEQ ID NO: 2253 - DNA, 26 bp, Homo sapiens
gggccacctggctcgtctccgtcttg

SEQ ID NO: 2254 - DNA, 26 bp, Homo sapiens
ggccacctggctcgtctccgtcttgg

SEQ ID NO: 2255 - DNA, 26 bp, Homo sapiens
gccacctggctcgtctccgtcttgga

SEQ ID NO: 2256 - DNA, 26 bp, Homo sapiens
ccacctggctcgtctccgtcttggac

SEQ ID NO: 2257 - DNA, 26 bp, Homo sapiens
cacctggctcgtctccgtcttggaca

SEQ ID NO: 2258 - DNA, 26 bp, Homo sapiens
acctggctcgtctccgtcttggacac

SEQ ID NO: 2259 - DNA, 26 bp, Homo sapiens
cctggctcgtctccgtcttggacacg

SEQ ID NO: 2260 - DNA, 26 bp, Homo sapiens
ctggctcgtctccgtcttggacacgg

SEQ ID NO: 2261 - DNA, 26 bp, Homo sapiens
tggctcgtctccgtcttggacacggt

SEQ ID NO: 2262 - DNA, 26 bp, Homo sapiens
ggctcgtctccgtcttggacacggta

SEQ ID NO: 2263 - DNA, 26 bp, Homo sapiens
gctcgtctccgtcttggacacggtag

SEQ ID NO: 2264 - DNA, 26 bp, Homo sapiens
ctcgtctccgtcttggacacggtagc

SEQ ID NO: 2265 - DNA, 26 bp, Homo sapiens
tcgtctccgtcttggacacggtagca

SEQ ID NO: 2266 - DNA, 26 bp, Homo sapiens
cgtctccgtcttggacacggtagcag

SEQ ID NO: 2267 - DNA, 26 bp, Homo sapiens
gtctccgtcttggacacggtagcaga

SEQ ID NO: 2268 - DNA, 26 bp, Homo sapiens
tctccgtcttggacacggtagcagag

SEQ ID NO: 2269 - DNA, 26 bp, Homo sapiens
ctccgtcttggacacggtagcagagg

SEQ ID NO: 2270 - DNA, 26 bp, Homo sapiens
tccgtcttggacacggtagcagaggc

SEQ ID NO: 2271 - DNA, 26 bp, Homo sapiens
ccgtcttggacacggtagcagaggcc

SEQ ID NO: 2272 - DNA, 26 bp, Homo sapiens
cgtcttggacacggtagcagaggcct

SEQ ID NO: 2273 - DNA, 26 bp, Homo sapiens
gtcttggacacggtagcagaggcctc

SEQ ID NO: 2274 - DNA, 26 bp, Homo sapiens
tcttggacacggtagcagaggcctca

SEQ ID NO: 2275 - DNA, 26 bp, Homo sapiens
cttggacacggtagcagaggcctcat

SEQ ID NO: 2276 - DNA, 26 bp, Homo sapiens
ttggacacggtagcagaggcctcatc

SEQ ID NO: 2277 - DNA, 26 bp, Homo sapiens
tggacacggtagcagaggcctcatcg

SEQ ID NO: 2278 - DNA, 26 bp, Homo sapiens
ggacacggtagcagaggcctcatcgt

SEQ ID NO: 2279 - DNA, 26 bp, Homo sapiens
gacacggtagcagaggcctcatcgtc

SEQ ID NO: 2280 - DNA, 26 bp, Homo sapiens
acacggtagcagaggcctcatcgtca

SEQ ID NO: 2281 - DNA, 26 bp, Homo sapiens
cacggtagcagaggcctcatcgtcac

SEQ ID NO: 2282 - DNA, 26 bp, Homo sapiens
acggtagcagaggcctcatcgtcacc

SEQ ID NO: 2283 - DNA, 26 bp, Homo sapiens
cggtagcagaggcctcatcgtcaccc

SEQ ID NO: 2284 - DNA, 26 bp, Homo sapiens
ggtagcagaggcctcatcgtcaccca

SEQ ID NO: 2285 - DNA, 26 bp, Homo sapiens
gtagcagaggcctcatcgtcacccag

SEQ ID NO: 2286 - DNA, 26 bp, Homo sapiens
tagcagaggcctcatcgtcacccagt

SEQ ID NO: 2287 - DNA, 26 bp, Homo sapiens
agcagaggcctcatcgtcacccagtg

SEQ ID NO: 2288 - DNA, 26 bp, Homo sapiens
gcagaggcctcatcgtcacccagtgg

SEQ ID NO: 2289 - DNA, 26 bp, Homo sapiens
cagaggcctcatcgtcacccagtggg

SEQ ID NO: 2290 - DNA, 26 bp, Homo sapiens
agaggcctcatcgtcacccagtgggt

SEQ ID NO: 2291 - DNA, 26 bp, Homo sapiens
gaggcctcatcgtcacccagtgggtt

SEQ ID NO: 2292 - DNA, 26 bp, Homo sapiens
aggcctcatcgtcacccagtgggttc

SEQ ID NO: 2293 - DNA, 26 bp, Homo sapiens
ggcctcatcgtcacccagtgggttct

SEQ ID NO: 2294 - DNA, 26 bp, Homo sapiens
gcctcatcgtcacccagtgggttctt

SEQ ID NO: 2295 - DNA, 26 bp, Homo sapiens
cctcatcgtcacccagtgggttcttg

SEQ ID NO: 2296 - DNA, 26 bp, Homo sapiens
ctcatcgtcacccagtgggttcttgc

SEQ ID NO: 2297 - DNA, 26 bp, Homo sapiens
tcatcgtcacccagtgggttcttgcc

SEQ ID NO: 2298 - DNA, 26 bp, Homo sapiens
catcgtcacccagtgggttcttgccg

SEQ ID NO: 2299 - DNA, 26 bp, Homo sapiens
atcgtcacccagtgggttcttgccgc

SEQ ID NO: 2300 - DNA, 26 bp, Homo sapiens
tcgtcacccagtgggttcttgccgca

SEQ ID NO: 2301 - DNA, 26 bp, Homo sapiens
cgtcacccagtgggttcttgccgcag

SEQ ID NO: 2302 - DNA, 26 bp, Homo sapiens
gtcacccagtgggttcttgccgcagc

SEQ ID NO: 2303 - DNA, 26 bp, Homo sapiens
tcacccagtgggttcttgccgcagca

SEQ ID NO: 2304 - DNA, 26 bp, Homo sapiens
cacccagtgggttcttgccgcagcag

SEQ ID NO: 2305 - DNA, 26 bp, Homo sapiens
acccagtgggttcttgccgcagcaga

SEQ ID NO: 2306 - DNA, 26 bp, Homo sapiens
cccagtgggttcttgccgcagcagat

SEQ ID NO: 2307 - DNA, 26 bp, Homo sapiens
ccagtgggttcttgccgcagcagatg

SEQ ID NO: 2308 - DNA, 26 bp, Homo sapiens
cagtgggttcttgccgcagcagatgg

SEQ ID NO: 2309 - DNA, 26 bp, Homo sapiens
agtgggttcttgccgcagcagatggt

SEQ ID NO: 2310 - DNA, 26 bp, Homo sapiens
gtgggttcttgccgcagcagatggtg

SEQ ID NO: 2311 - DNA, 26 bp, Homo sapiens
tgggttcttgccgcagcagatggtgg

SEQ ID NO: 2312 - DNA, 26 bp, Homo sapiens
gggttcttgccgcagcagatggtggt

SEQ ID NO: 2313 - DNA, 26 bp, Homo sapiens
ggttcttgccgcagcagatggtggtg

SEQ ID NO: 2314 - DNA, 26 bp, Homo sapiens
gttcttgccgcagcagatggtggtga

SEQ ID NO: 2315 - DNA, 26 bp, Homo sapiens
ttcttgccgcagcagatggtggtgag

SEQ ID NO: 2316 - DNA, 26 bp, Homo sapiens
tcttgccgcagcagatggtggtgagc

SEQ ID NO: 2317 - DNA, 26 bp, Homo sapiens
cttgccgcagcagatggtggtgagca

SEQ ID NO: 2318 - DNA, 26 bp, Homo sapiens
ttgccgcagcagatggtggtgagcat

SEQ ID NO: 2319 - DNA, 26 bp, Homo sapiens
tgccgcagcagatggtggtgagcatg

SEQ ID NO: 2320 - DNA, 26 bp, Homo sapiens
gccgcagcagatggtggtgagcatgc

SEQ ID NO: 2321 - DNA, 26 bp, Homo sapiens
ccgcagcagatggtggtgagcatgca

SEQ ID NO: 2322 - DNA, 26 bp, Homo sapiens
cgcagcagatggtggtgagcatgcag

SEQ ID NO: 2323 - DNA, 26 bp, Homo sapiens
gcagcagatggtggtgagcatgcagt

SEQ ID NO: 2324 - DNA, 26 bp, Homo sapiens
cagcagatggtggtgagcatgcagtt

SEQ ID NO: 2325 - DNA, 26 bp, Homo sapiens
agcagatggtggtgagcatgcagttc

SEQ ID NO: 2326 - DNA, 26 bp, Homo sapiens
gcagatggtggtgagcatgcagttcc

SEQ ID NO: 2327 - DNA, 26 bp, Homo sapiens
cagatggtggtgagcatgcagttccg

SEQ ID NO: 2328 - DNA, 26 bp, Homo sapiens
agatggtggtgagcatgcagttccgg

SEQ ID NO: 2329 - DNA, 26 bp, Homo sapiens
gatggtggtgagcatgcagttccgga

SEQ ID NO: 2330 - DNA, 26 bp, Homo sapiens
atggtggtgagcatgcagttccggaa

SEQ ID NO: 2331 - DNA, 26 bp, Homo sapiens
tggtggtgagcatgcagttccggaac

SEQ ID NO: 2332 - DNA, 26 bp, Homo sapiens
ggtggtgagcatgcagttccggaact

SEQ ID NO: 2333 - DNA, 26 bp, Homo sapiens
gtggtgagcatgcagttccggaactg

SEQ ID NO: 2334 - DNA, 26 bp, Homo sapiens
tggtgagcatgcagttccggaactgc

SEQ ID NO: 2335 - DNA, 26 bp, Homo sapiens
ggtgagcatgcagttccggaactgct

SEQ ID NO: 2336 - DNA, 26 bp, Homo sapiens
gtgagcatgcagttccggaactgctt

SEQ ID NO: 2337 - DNA, 26 bp, Homo sapiens
tgagcatgcagttccggaactgcttg

SEQ ID NO: 2338 - DNA, 26 bp, Homo sapiens
gagcatgcagttccggaactgcttgt

SEQ ID NO: 2339 - DNA, 26 bp, Homo sapiens
agcatgcagttccggaactgcttgtt

SEQ ID NO: 2340 - DNA, 26 bp, Homo sapiens
gcatgcagttccggaactgcttgttc

SEQ ID NO: 2341 - DNA, 26 bp, Homo sapiens
catgcagttccggaactgcttgttca

SEQ ID NO: 2342 - DNA, 26 bp, Homo sapiens
atgcagttccggaactgcttgttcat

SEQ ID NO: 2343 - DNA, 26 bp, Homo sapiens
tgcagttccggaactgcttgttcatc

SEQ ID NO: 2344 - DNA, 26 bp, Homo sapiens
gcagttccggaactgcttgttcatca

SEQ ID NO: 2345 - DNA, 26 bp, Homo sapiens
cagttccggaactgcttgttcatcat

SEQ ID NO: 2346 - DNA, 26 bp, Homo sapiens
agttccggaactgcttgttcatcatg

SEQ ID NO: 2347 - DNA, 26 bp, Homo sapiens
gttccggaactgcttgttcatcatga

SEQ ID NO: 2348 - DNA, 26 bp, Homo sapiens
ttccggaactgcttgttcatcatgat

SEQ ID NO: 2349 - DNA, 26 bp, Homo sapiens
tccggaactgcttgttcatcatgata

SEQ ID NO: 2350 - DNA, 26 bp, Homo sapiens
ccggaactgcttgttcatcatgatat

SEQ ID NO: 2351 - DNA, 26 bp, Homo sapiens
cggaactgcttgttcatcatgatata

SEQ ID NO: 2352 - DNA, 26 bp, Homo sapiens
ggaactgcttgttcatcatgatatag

SEQ ID NO: 2353 - DNA, 26 bp, Homo sapiens
gaactgcttgttcatcatgatataga

SEQ ID NO: 2354 - DNA, 26 bp, Homo sapiens
aactgcttgttcatcatgatatagat

SEQ ID NO: 2355 - DNA, 26 bp, Homo sapiens
actgcttgttcatcatgatatagatg

SEQ ID NO: 2356 - DNA, 26 bp, Homo sapiens
ctgcttgttcatcatgatatagatga

SEQ ID NO: 2357 - DNA, 26 bp, Homo sapiens
tgcttgttcatcatgatatagatgac

SEQ ID NO: 2358 - DNA, 26 bp, Homo sapiens
gcttgttcatcatgatatagatgaca

SEQ ID NO: 2359 - DNA, 26 bp, Homo sapiens
cttgttcatcatgatatagatgacag

SEQ ID NO: 2360 - DNA, 26 bp, Homo sapiens
ttgttcatcatgatatagatgacagg

SEQ ID NO: 2361 - DNA, 26 bp, Homo sapiens
tgttcatcatgatatagatgacaggg

SEQ ID NO: 2362 - DNA, 26 bp, Homo sapiens
gttcatcatgatatagatgacagggt

SEQ ID NO: 2363 - DNA, 26 bp, Homo sapiens
ttcatcatgatatagatgacagggtt

SEQ ID NO: 2364 - DNA, 26 bp, Homo sapiens
tcatcatgatatagatgacagggttg

SEQ ID NO: 2365 - DNA, 26 bp, Homo sapiens
catcatgatatagatgacagggttgt

SEQ ID NO: 2366 - DNA, 26 bp, Homo sapiens
atcatgatatagatgacagggttgta

SEQ ID NO: 2367 - DNA, 26 bp, Homo sapiens
tcatgatatagatgacagggttgtag

SEQ ID NO: 2368 - DNA, 26 bp, Homo sapiens
catgatatagatgacagggttgtaga

SEQ ID NO: 2369 - DNA, 26 bp, Homo sapiens
atgatatagatgacagggttgtagat

SEQ ID NO: 2370 - DNA, 26 bp, Homo sapiens
tgatatagatgacagggttgtagatg

SEQ ID NO: 2371 - DNA, 26 bp, Homo sapiens
gatatagatgacagggttgtagatgg

SEQ ID NO: 2372 - DNA, 26 bp, Homo sapiens
atatagatgacagggttgtagatggc

SEQ ID NO: 2373 - DNA, 26 bp, Homo sapiens
tatagatgacagggttgtagatggcg

SEQ ID NO: 2374 - DNA, 26 bp, Homo sapiens
atagatgacagggttgtagatggcgg

SEQ ID NO: 2375 - DNA, 26 bp, Homo sapiens
tagatgacagggttgtagatggcggc

SEQ ID NO: 2376 - DNA, 26 bp, Homo sapiens
agatgacagggttgtagatggcggcg

SEQ ID NO: 2377 - DNA, 26 bp, Homo sapiens
gatgacagggttgtagatggcggcgc

SEQ ID NO: 2378 - DNA, 26 bp, Homo sapiens
atgacagggttgtagatggcggcgct

SEQ ID NO: 2379 - DNA, 26 bp, Homo sapiens
tgacagggttgtagatggcggcgctc

SEQ ID NO: 2380 - DNA, 26 bp, Homo sapiens
gacagggttgtagatggcggcgctct

SEQ ID NO: 2381 - DNA, 26 bp, Homo sapiens
acagggttgtagatggcggcgctctt

SEQ ID NO: 2382 - DNA, 26 bp, Homo sapiens
cagggttgtagatggcggcgctcttg

SEQ ID NO: 2383 - DNA, 26 bp, Homo sapiens
agggttgtagatggcggcgctcttgg

SEQ ID NO: 2384 - DNA, 26 bp, Homo sapiens
gggttgtagatggcggcgctcttggc

SEQ ID NO: 2385 - DNA, 26 bp, Homo sapiens
ggttgtagatggcggcgctcttggca

SEQ ID NO: 2386 - DNA, 26 bp, Homo sapiens
gttgtagatggcggcgctcttggcaa

SEQ ID NO: 2387 - DNA, 26 bp, Homo sapiens
ttgtagatggcggcgctcttggcaaa

SEQ ID NO: 2388 - DNA, 26 bp, Homo sapiens
tgtagatggcggcgctcttggcaaag

SEQ ID NO: 2389 - DNA, 26 bp, Homo sapiens
gtagatggcggcgctcttggcaaaga

SEQ ID NO: 2390 - DNA, 26 bp, Homo sapiens
tagatggcggcgctcttggcaaagaa

SEQ ID NO: 2391 - DNA, 26 bp, Homo sapiens
agatggcggcgctcttggcaaagaac

SEQ ID NO: 2392 - DNA, 26 bp, Homo sapiens
gatggcggcgctcttggcaaagaacg

SEQ ID NO: 2393 - DNA, 26 bp, Homo sapiens
atggcggcgctcttggcaaagaacgc

SEQ ID NO: 2394 - DNA, 26 bp, Homo sapiens
tggcggcgctcttggcaaagaacgct

SEQ ID NO: 2395 - DNA, 26 bp, Homo sapiens
ggcggcgctcttggcaaagaacgctg

SEQ ID NO: 2396 - DNA, 26 bp, Homo sapiens
gcggcgctcttggcaaagaacgctgg

SEQ ID NO: 2397 - DNA, 26 bp, Homo sapiens
cggcgctcttggcaaagaacgctggg

SEQ ID NO: 2398 - DNA, 26 bp, Homo sapiens
ggcgctcttggcaaagaacgctggga

SEQ ID NO: 2399 - DNA, 26 bp, Homo sapiens
gcgctcttggcaaagaacgctgggat

SEQ ID NO: 2400 - DNA, 26 bp, Homo sapiens
cgctcttggcaaagaacgctgggatg

SEQ ID NO: 2401 - DNA, 26 bp, Homo sapiens
gctcttggcaaagaacgctgggatgg

SEQ ID NO: 2402 - DNA, 26 bp, Homo sapiens
ctcttggcaaagaacgctgggatggt

SEQ ID NO: 2403 - DNA, 26 bp, Homo sapiens
tcttggcaaagaacgctgggatggtc

SEQ ID NO: 2404 - DNA, 26 bp, Homo sapiens
cttggcaaagaacgctgggatggtca

SEQ ID NO: 2405 - DNA, 26 bp, Homo sapiens
ttggcaaagaacgctgggatggtcat

SEQ ID NO: 2406 - DNA, 26 bp, Homo sapiens
tggcaaagaacgctgggatggtcatg

SEQ ID NO: 2407 - DNA, 26 bp, Homo sapiens
ggcaaagaacgctgggatggtcatga

SEQ ID NO: 2408 - DNA, 26 bp, Homo sapiens
gcaaagaacgctgggatggtcatgaa

SEQ ID NO: 2409 - DNA, 26 bp, Homo sapiens
caaagaacgctgggatggtcatgaag

SEQ ID NO: 2410 - DNA, 26 bp, Homo sapiens
aaagaacgctgggatggtcatgaaga

SEQ ID NO: 2411 - DNA, 26 bp, Homo sapiens
aagaacgctgggatggtcatgaagat

SEQ ID NO: 2412 - DNA, 26 bp, Homo sapiens
agaacgctgggatggtcatgaagatg

SEQ ID NO: 2413 - DNA, 26 bp, Homo sapiens
gaacgctgggatggtcatgaagatgg

SEQ ID NO: 2414 - DNA, 26 bp, Homo sapiens
aacgctgggatggtcatgaagatggg

SEQ ID NO: 2415 - DNA, 26 bp, Homo sapiens
acgctgggatggtcatgaagatggga

SEQ ID NO: 2416 - DNA, 26 bp, Homo sapiens
cgctgggatggtcatgaagatgggac

SEQ ID NO: 2417 - DNA, 26 bp, Homo sapiens
gctgggatggtcatgaagatgggacc

SEQ ID NO: 2418 - DNA, 26 bp, Homo sapiens
ctgggatggtcatgaagatgggaccg

SEQ ID NO: 2419 - DNA, 26 bp, Homo sapiens
tgggatggtcatgaagatgggaccga

SEQ ID NO: 2420 - DNA, 26 bp, Homo sapiens
gggatggtcatgaagatgggaccgaa

SEQ ID NO: 2421 - DNA, 26 bp, Homo sapiens
ggatggtcatgaagatgggaccgaag

SEQ ID NO: 2422 - DNA, 26 bp, Homo sapiens
gatggtcatgaagatgggaccgaagt

SEQ ID NO: 2423 - DNA, 26 bp, Homo sapiens
atggtcatgaagatgggaccgaagtt

SEQ ID NO: 2424 - DNA, 26 bp, Homo sapiens
tggtcatgaagatgggaccgaagttg

SEQ ID NO: 2425 - DNA, 26 bp, Homo sapiens
ggtcatgaagatgggaccgaagttgg

SEQ ID NO: 2426 - DNA, 26 bp, Homo sapiens
gtcatgaagatgggaccgaagttgga

SEQ ID NO: 2427 - DNA, 26 bp, Homo sapiens
tcatgaagatgggaccgaagttggag

SEQ ID NO: 2428 - DNA, 26 bp, Homo sapiens
catgaagatgggaccgaagttggagc

SEQ ID NO: 2429 - DNA, 26 bp, Homo sapiens
atgaagatgggaccgaagttggagcc

SEQ ID NO: 2430 - DNA, 26 bp, Homo sapiens
tgaagatgggaccgaagttggagccc

SEQ ID NO: 2431 - DNA, 26 bp, Homo sapiens
gaagatgggaccgaagttggagccct

SEQ ID NO: 2432 - DNA, 26 bp, Homo sapiens
aagatgggaccgaagttggagccctg

SEQ ID NO: 2433 - DNA, 26 bp, Homo sapiens
agatgggaccgaagttggagccctgg

SEQ ID NO: 2434 - DNA, 26 bp, Homo sapiens
gatgggaccgaagttggagccctggt

SEQ ID NO: 2435 - DNA, 26 bp, Homo sapiens
atgggaccgaagttggagccctggtg

SEQ ID NO: 2436 - DNA, 26 bp, Homo sapiens
tgggaccgaagttggagccctggtgg

SEQ ID NO: 2437 - DNA, 26 bp, Homo sapiens
gggaccgaagttggagccctggtggg

SEQ ID NO: 2438 - DNA, 26 bp, Homo sapiens
ggaccgaagttggagccctggtgggt

SEQ ID NO: 2439 - DNA, 26 bp, Homo sapiens
gaccgaagttggagccctggtgggtg

SEQ ID NO: 2440 - DNA, 26 bp, Homo sapiens
accgaagttggagccctggtgggtga

SEQ ID NO: 2441 - DNA, 26 bp, Homo sapiens
ccgaagttggagccctggtgggtgaa

SEQ ID NO: 2442 - DNA, 26 bp, Homo sapiens
cgaagttggagccctggtgggtgaag

SEQ ID NO: 2443 - DNA, 26 bp, Homo sapiens
gaagttggagccctggtgggtgaaga

SEQ ID NO: 2444 - DNA, 26 bp, Homo sapiens
aagttggagccctggtgggtgaagat

SEQ ID NO: 2445 - DNA, 26 bp, Homo sapiens
agttggagccctggtgggtgaagatg

SEQ ID NO: 2446 - DNA, 26 bp, Homo sapiens
gttggagccctggtgggtgaagatgt

SEQ ID NO: 2447 - DNA, 26 bp, Homo sapiens
ttggagccctggtgggtgaagatgta

SEQ ID NO: 2448 - DNA, 26 bp, Homo sapiens
tggagccctggtgggtgaagatgtag

SEQ ID NO: 2449 - DNA, 26 bp, Homo sapiens
ggagccctggtgggtgaagatgtaga

SEQ ID NO: 2450 - DNA, 26 bp, Homo sapiens
gagccctggtgggtgaagatgtagaa

SEQ ID NO: 2451 - DNA, 26 bp, Homo sapiens
agccctggtgggtgaagatgtagaat

SEQ ID NO: 2452 - DNA, 26 bp, Homo sapiens
gccctggtgggtgaagatgtagaatg

SEQ ID NO: 2453 - DNA, 26 bp, Homo sapiens
ccctggtgggtgaagatgtagaatgc

SEQ ID NO: 2454 - DNA, 26 bp, Homo sapiens
cctggtgggtgaagatgtagaatgcc

SEQ ID NO: 2455 - DNA, 26 bp, Homo sapiens
ctggtgggtgaagatgtagaatgcca

SEQ ID NO: 2456 - DNA, 26 bp, Homo sapiens
tggtgggtgaagatgtagaatgccac

SEQ ID NO: 2457 - DNA, 26 bp, Homo sapiens
ggtgggtgaagatgtagaatgccacg

SEQ ID NO: 2458 - DNA, 26 bp, Homo sapiens
gtgggtgaagatgtagaatgccacgc

SEQ ID NO: 2459 - DNA, 26 bp, Homo sapiens
tgggtgaagatgtagaatgccacgct

SEQ ID NO: 2460 - DNA, 26 bp, Homo sapiens
gggtgaagatgtagaatgccacgctg

SEQ ID NO: 2461 - DNA, 26 bp, Homo sapiens
ggtgaagatgtagaatgccacgctgg

SEQ ID NO: 2462 - DNA, 26 bp, Homo sapiens
gtgaagatgtagaatgccacgctggc

SEQ ID NO: 2463 - DNA, 26 bp, Homo sapiens
tgaagatgtagaatgccacgctggcg

SEQ ID NO: 2464 - DNA, 26 bp, Homo sapiens
gaagatgtagaatgccacgctggcgt

SEQ ID NO: 2465 - DNA, 26 bp, Homo sapiens
aagatgtagaatgccacgctggcgta

SEQ ID NO: 2466 - DNA, 26 bp, Homo sapiens
agatgtagaatgccacgctggcgtag

SEQ ID NO: 2467 - DNA, 26 bp, Homo sapiens
gatgtagaatgccacgctggcgtagg

SEQ ID NO: 2468 - DNA, 26 bp, Homo sapiens
atgtagaatgccacgctggcgtaggg

SEQ ID NO: 2469 - DNA, 26 bp, Homo sapiens
tgtagaatgccacgctggcgtagggc

SEQ ID NO: 2470 - DNA, 26 bp, Homo sapiens
gtagaatgccacgctggcgtagggca

SEQ ID NO: 2471 - DNA, 26 bp, Homo sapiens
tagaatgccacgctggcgtagggcac

SEQ ID NO: 2472 - DNA, 26 bp, Homo sapiens
agaatgccacgctggcgtagggcacc

SEQ ID NO: 2473 - DNA, 26 bp, Homo sapiens
gaatgccacgctggcgtagggcaccc

SEQ ID NO: 2474 - DNA, 26 bp, Homo sapiens
aatgccacgctggcgtagggcaccca

SEQ ID NO: 2475 - DNA, 26 bp, Homo sapiens
atgccacgctggcgtagggcacccag

SEQ ID NO: 2476 - DNA, 26 bp, Homo sapiens
tgccacgctggcgtagggcacccagc

SEQ ID NO: 2477 - DNA, 26 bp, Homo sapiens
gccacgctggcgtagggcacccagca

SEQ ID NO: 2478 - DNA, 26 bp, Homo sapiens
ccacgctggcgtagggcacccagcag

SEQ ID NO: 2479 - DNA, 26 bp, Homo sapiens
cacgctggcgtagggcacccagcaga

SEQ ID NO: 2480 - DNA, 26 bp, Homo sapiens
acgctggcgtagggcacccagcagat

SEQ ID NO: 2481 - DNA, 26 bp, Homo sapiens
cgctggcgtagggcacccagcagatc

SEQ ID NO: 2482 - DNA, 26 bp, Homo sapiens
gctggcgtagggcacccagcagatca

SEQ ID NO: 2483 - DNA, 26 bp, Homo sapiens
ctggcgtagggcacccagcagatcag

SEQ ID NO: 2484 - DNA, 26 bp, Homo sapiens
tggcgtagggcacccagcagatcagg

SEQ ID NO: 2485 - DNA, 26 bp, Homo sapiens
ggcgtagggcacccagcagatcagga

SEQ ID NO: 2486 - DNA, 26 bp, Homo sapiens
gcgtagggcacccagcagatcaggaa

SEQ ID NO: 2487 - DNA, 26 bp, Homo sapiens
cgtagggcacccagcagatcaggaaa

SEQ ID NO: 2488 - DNA, 26 bp, Homo sapiens
gtagggcacccagcagatcaggaaag

SEQ ID NO: 2489 - DNA, 26 bp, Homo sapiens
tagggcacccagcagatcaggaaagc

SEQ ID NO: 2490 - DNA, 26 bp, Homo sapiens
agggcacccagcagatcaggaaagcg

SEQ ID NO: 2491 - DNA, 26 bp, Homo sapiens
gggcacccagcagatcaggaaagcga

SEQ ID NO: 2492 - DNA, 26 bp, Homo sapiens
ggcacccagcagatcaggaaagcgat

SEQ ID NO: 2493 - DNA, 26 bp, Homo sapiens
gcacccagcagatcaggaaagcgatg

SEQ ID NO: 2494 - DNA, 26 bp, Homo sapiens
cacccagcagatcaggaaagcgatga

SEQ ID NO: 2495 - DNA, 26 bp, Homo sapiens
acccagcagatcaggaaagcgatgac

SEQ ID NO: 2496 - DNA, 26 bp, Homo sapiens
cccagcagatcaggaaagcgatgacc

SEQ ID NO: 2497 - DNA, 26 bp, Homo sapiens
ccagcagatcaggaaagcgatgacca

SEQ ID NO: 2498 - DNA, 26 bp, Homo sapiens
cagcagatcaggaaagcgatgaccat

SEQ ID NO: 2499 - DNA, 26 bp, Homo sapiens
agcagatcaggaaagcgatgaccatg

SEQ ID NO: 2500 - DNA, 26 bp, Homo sapiens
gcagatcaggaaagcgatgaccatga

SEQ ID NO: 2501 - DNA, 26 bp, Homo sapiens
cagatcaggaaagcgatgaccatgat

SEQ ID NO: 2502 - DNA, 26 bp, Homo sapiens
agatcaggaaagcgatgaccatgatg

SEQ ID NO: 2503 - DNA, 26 bp, Homo sapiens
gatcaggaaagcgatgaccatgatga

SEQ ID NO: 2504 - DNA, 26 bp, Homo sapiens
atcaggaaagcgatgaccatgatgat

SEQ ID NO: 2505 - DNA, 26 bp, Homo sapiens
tcaggaaagcgatgaccatgatgatg

SEQ ID NO: 2506 - DNA, 26 bp, Homo sapiens
caggaaagcgatgaccatgatgatga

SEQ ID NO: 2507 - DNA, 26 bp, Homo sapiens
aggaaagcgatgaccatgatgatgac

SEQ ID NO: 2508 - DNA, 26 bp, Homo sapiens
ggaaagcgatgaccatgatgatgacc

SEQ ID NO: 2509 - DNA, 26 bp, Homo sapiens
gaaagcgatgaccatgatgatgacca

SEQ ID NO: 2510 - DNA, 26 bp, Homo sapiens
aaagcgatgaccatgatgatgaccat

SEQ ID NO: 2511 - DNA, 26 bp, Homo sapiens
aagcgatgaccatgatgatgaccatg

SEQ ID NO: 2512 - DNA, 26 bp, Homo sapiens
agcgatgaccatgatgatgaccatgc

SEQ ID NO: 2513 - DNA, 26 bp, Homo sapiens
gcgatgaccatgatgatgaccatgcg

SEQ ID NO: 2514 - DNA, 26 bp, Homo sapiens
cgatgaccatgatgatgaccatgcgg

SEQ ID NO: 2515 - DNA, 26 bp, Homo sapiens
gatgaccatgatgatgaccatgcggg

SEQ ID NO: 2516 - DNA, 26 bp, Homo sapiens
atgaccatgatgatgaccatgcgggt

SEQ ID NO: 2517 - DNA, 26 bp, Homo sapiens
tgaccatgatgatgaccatgcgggtg

SEQ ID NO: 2518 - DNA, 26 bp, Homo sapiens
gaccatgatgatgaccatgcgggtga

SEQ ID NO: 2519 - DNA, 26 bp, Homo sapiens
accatgatgatgaccatgcgggtgac

SEQ ID NO: 2520 - DNA, 26 bp, Homo sapiens
ccatgatgatgaccatgcgggtgacc

SEQ ID NO: 2521 - DNA, 26 bp, Homo sapiens
catgatgatgaccatgcgggtgacct

SEQ ID NO: 2522 - DNA, 26 bp, Homo sapiens
atgatgatgaccatgcgggtgacctc

SEQ ID NO: 2523 - DNA, 26 bp, Homo sapiens
tgatgatgaccatgcgggtgacctcc

SEQ ID NO: 2524 - DNA, 26 bp, Homo sapiens
gatgatgaccatgcgggtgacctcct

SEQ ID NO: 2525 - DNA, 26 bp, Homo sapiens
atgatgaccatgcgggtgacctcctt

SEQ ID NO: 2526 - DNA, 26 bp, Homo sapiens
tgatgaccatgcgggtgacctccttc

SEQ ID NO: 2527 - DNA, 26 bp, Homo sapiens
gatgaccatgcgggtgacctccttct

SEQ ID NO: 2528 - DNA, 26 bp, Homo sapiens
atgaccatgcgggtgacctccttctc

SEQ ID NO: 2529 - DNA, 26 bp, Homo sapiens
tgaccatgcgggtgacctccttctct

SEQ ID NO: 2530 - DNA, 26 bp, Homo sapiens
gaccatgcgggtgacctccttctctg

SEQ ID NO: 2531 - DNA, 26 bp, Homo sapiens
accatgcgggtgacctccttctctgc

SEQ ID NO: 2532 - DNA, 26 bp, Homo sapiens
ccatgcgggtgacctccttctctgcc

SEQ ID NO: 2533 - DNA, 26 bp, Homo sapiens
catgcgggtgacctccttctctgcct

SEQ ID NO: 2534 - DNA, 26 bp, Homo sapiens
atgcgggtgacctccttctctgcctt

SEQ ID NO: 2535 - DNA, 26 bp, Homo sapiens
tgcgggtgacctccttctctgccttc

SEQ ID NO: 2536 - DNA, 26 bp, Homo sapiens
gcgggtgacctccttctctgccttct

SEQ ID NO: 2537 - DNA, 26 bp, Homo sapiens
cgggtgacctccttctctgccttctg

SEQ ID NO: 2538 - DNA, 26 bp, Homo sapiens
gggtgacctccttctctgccttctgt

SEQ ID NO: 2539 - DNA, 26 bp, Homo sapiens
ggtgacctccttctctgccttctgtg

SEQ ID NO: 2540 - DNA, 26 bp, Homo sapiens
gtgacctccttctctgccttctgtgt

SEQ ID NO: 2541 - DNA, 26 bp, Homo sapiens
tgacctccttctctgccttctgtgtg

SEQ ID NO: 2542 - DNA, 26 bp, Homo sapiens
gacctccttctctgccttctgtgtgg

SEQ ID NO: 2543 - DNA, 26 bp, Homo sapiens
acctccttctctgccttctgtgtggt

SEQ ID NO: 2544 - DNA, 26 bp, Homo sapiens
cctccttctctgccttctgtgtggtg

SEQ ID NO: 2545 - DNA, 26 bp, Homo sapiens
ctccttctctgccttctgtgtggtgg

SEQ ID NO: 2546 - DNA, 26 bp, Homo sapiens
tccttctctgccttctgtgtggtggc

SEQ ID NO: 2547 - DNA, 26 bp, Homo sapiens
ccttctctgccttctgtgtggtggct

SEQ ID NO: 2548 - DNA, 26 bp, Homo sapiens
cttctctgccttctgtgtggtggctg

SEQ ID NO: 2549 - DNA, 26 bp, Homo sapiens
ttctctgccttctgtgtggtggctga

SEQ ID NO: 2550 - DNA, 26 bp, Homo sapiens
tctctgccttctgtgtggtggctgac

SEQ ID NO: 2551 - DNA, 26 bp, Homo sapiens
ctctgccttctgtgtggtggctgact

SEQ ID NO: 2552 - DNA, 26 bp, Homo sapiens
tctgccttctgtgtggtggctgactc

SEQ ID NO: 2553 - DNA, 26 bp, Homo sapiens
ctgccttctgtgtggtggctgactcc

SEQ ID NO: 2554 - DNA, 26 bp, Homo sapiens
tgccttctgtgtggtggctgactcct

SEQ ID NO: 2555 - DNA, 26 bp, Homo sapiens
gccttctgtgtggtggctgactcctg

SEQ ID NO: 2556 - DNA, 26 bp, Homo sapiens
ccttctgtgtggtggctgactcctgc

SEQ ID NO: 2557 - DNA, 26 bp, Homo sapiens
cttctgtgtggtggctgactcctgct

SEQ ID NO: 2558 - DNA, 26 bp, Homo sapiens
ttctgtgtggtggctgactcctgctg

SEQ ID NO: 2559 - DNA, 26 bp, Homo sapiens
tctgtgtggtggctgactcctgctgc

SEQ ID NO: 2560 - DNA, 26 bp, Homo sapiens
ctgtgtggtggctgactcctgctgct

SEQ ID NO: 2561 - DNA, 26 bp, Homo sapiens
tgtgtggtggctgactcctgctgctg

SEQ ID NO: 2562 - DNA, 26 bp, Homo sapiens
gtgtggtggctgactcctgctgctgg

SEQ ID NO: 2563 - DNA, 26 bp, Homo sapiens
tgtggtggctgactcctgctgctggg

SEQ ID NO: 2564 - DNA, 26 bp, Homo sapiens
gtggtggctgactcctgctgctgggc

SEQ ID NO: 2565 - DNA, 26 bp, Homo sapiens
tggtggctgactcctgctgctgggca

SEQ ID NO: 2566 - DNA, 26 bp, Homo sapiens
ggtggctgactcctgctgctgggcag

SEQ ID NO: 2567 - DNA, 26 bp, Homo sapiens
gtggctgactcctgctgctgggcagc

SEQ ID NO: 2568 - DNA, 26 bp, Homo sapiens
tggctgactcctgctgctgggcagcg

SEQ ID NO: 2569 - DNA, 26 bp, Homo sapiens
ggctgactcctgctgctgggcagcgg

SEQ ID NO: 2570 - DNA, 26 bp, Homo sapiens
gctgactcctgctgctgggcagcggc

SEQ ID NO: 2571 - DNA, 26 bp, Homo sapiens
ctgactcctgctgctgggcagcggcc

SEQ ID NO: 2572 - DNA, 26 bp, Homo sapiens
tgactcctgctgctgggcagcggcct

SEQ ID NO: 2573 - DNA, 26 bp, Homo sapiens
gactcctgctgctgggcagcggcctc

SEQ ID NO: 2574 - DNA, 26 bp, Homo sapiens
actcctgctgctgggcagcggcctcc

SEQ ID NO: 2575 - DNA, 26 bp, Homo sapiens
ctcctgctgctgggcagcggcctcct

SEQ ID NO: 2576 - DNA, 26 bp, Homo sapiens
tcctgctgctgggcagcggcctcctt

SEQ ID NO: 2577 - DNA, 26 bp, Homo sapiens
cctgctgctgggcagcggcctccttg

SEQ ID NO: 2578 - DNA, 26 bp, Homo sapiens
ctgctgctgggcagcggcctccttga

SEQ ID NO: 2579 - DNA, 26 bp, Homo sapiens
tgctgctgggcagcggcctccttgac

SEQ ID NO: 2580 - DNA, 26 bp, Homo sapiens
gctgctgggcagcggcctccttgacg

SEQ ID NO: 2581 - DNA, 26 bp, Homo sapiens
ctgctgggcagcggcctccttgacgg

SEQ ID NO: 2582 - DNA, 26 bp, Homo sapiens
tgctgggcagcggcctccttgacggt

SEQ ID NO: 2583 - DNA, 26 bp, Homo sapiens
gctgggcagcggcctccttgacggtg

SEQ ID NO: 2584 - DNA, 26 bp, Homo sapiens
ctgggcagcggcctccttgacggtga

SEQ ID NO: 2585 - DNA, 26 bp, Homo sapiens
tgggcagcggcctccttgacggtgaa

SEQ ID NO: 2586 - DNA, 26 bp, Homo sapiens
gggcagcggcctccttgacggtgaag

SEQ ID NO: 2587 - DNA, 26 bp, Homo sapiens
ggcagcggcctccttgacggtgaaga

SEQ ID NO: 2588 - DNA, 26 bp, Homo sapiens
gcagcggcctccttgacggtgaagac

SEQ ID NO: 2589 - DNA, 26 bp, Homo sapiens
cagcggcctccttgacggtgaagacg

SEQ ID NO: 2590 - DNA, 26 bp, Homo sapiens
agcggcctccttgacggtgaagacga

SEQ ID NO: 2591 - DNA, 26 bp, Homo sapiens
gcggcctccttgacggtgaagacgag

SEQ ID NO: 2592 - DNA, 26 bp, Homo sapiens
cggcctccttgacggtgaagacgagc

SEQ ID NO: 2593 - DNA, 26 bp, Homo sapiens
ggcctccttgacggtgaagacgagct

SEQ ID NO: 2594 - DNA, 26 bp, Homo sapiens
gcctccttgacggtgaagacgagctg

SEQ ID NO: 2595 - DNA, 26 bp, Homo sapiens
cctccttgacggtgaagacgagctgc

SEQ ID NO: 2596 - DNA, 26 bp, Homo sapiens
ctccttgacggtgaagacgagctgcc

SEQ ID NO: 2597 - DNA, 26 bp, Homo sapiens
tccttgacggtgaagacgagctgccc

SEQ ID NO: 2598 - DNA, 26 bp, Homo sapiens
ccttgacggtgaagacgagctgccca

SEQ ID NO: 2599 - DNA, 26 bp, Homo sapiens
cttgacggtgaagacgagctgcccat

SEQ ID NO: 2600 - DNA, 26 bp, Homo sapiens
ttgacggtgaagacgagctgcccata

SEQ ID NO: 2601 - DNA, 26 bp, Homo sapiens
tgacggtgaagacgagctgcccatag

SEQ ID NO: 2602 - DNA, 26 bp, Homo sapiens
gacggtgaagacgagctgcccatagc

SEQ ID NO: 2603 - DNA, 26 bp, Homo sapiens
acggtgaagacgagctgcccatagca

SEQ ID NO: 2604 - DNA, 26 bp, Homo sapiens
cggtgaagacgagctgcccatagcag

SEQ ID NO: 2605 - DNA, 26 bp, Homo sapiens
ggtgaagacgagctgcccatagcaga

SEQ ID NO: 2606 - DNA, 26 bp, Homo sapiens
gtgaagacgagctgcccatagcagaa

SEQ ID NO: 2607 - DNA, 26 bp, Homo sapiens
tgaagacgagctgcccatagcagaaa

SEQ ID NO: 2608 - DNA, 26 bp, Homo sapiens
gaagacgagctgcccatagcagaaaa

SEQ ID NO: 2609 - DNA, 26 bp, Homo sapiens
aagacgagctgcccatagcagaaaaa

SEQ ID NO: 2610 - DNA, 26 bp, Homo sapiens
agacgagctgcccatagcagaaaaag

SEQ ID NO: 2611 - DNA, 26 bp, Homo sapiens
gacgagctgcccatagcagaaaaaga

SEQ ID NO: 2612 - DNA, 26 bp, Homo sapiens
acgagctgcccatagcagaaaaagat

SEQ ID NO: 2613 - DNA, 26 bp, Homo sapiens
cgagctgcccatagcagaaaaagatg

SEQ ID NO: 2614 - DNA, 26 bp, Homo sapiens
gagctgcccatagcagaaaaagatga

SEQ ID NO: 2615 - DNA, 26 bp, Homo sapiens
agctgcccatagcagaaaaagatgat

SEQ ID NO: 2616 - DNA, 26 bp, Homo sapiens
gctgcccatagcagaaaaagatgata

SEQ ID NO: 2617 - DNA, 26 bp, Homo sapiens
ctgcccatagcagaaaaagatgataa

SEQ ID NO: 2618 - DNA, 26 bp, Homo sapiens
tgcccatagcagaaaaagatgataat

SEQ ID NO: 2619 - DNA, 26 bp, Homo sapiens
gcccatagcagaaaaagatgataatc

SEQ ID NO: 2620 - DNA, 26 bp, Homo sapiens
cccatagcagaaaaagatgataatca

SEQ ID NO: 2621 - DNA, 26 bp, Homo sapiens
ccatagcagaaaaagatgataatcat

SEQ ID NO: 2622 - DNA, 26 bp, Homo sapiens
catagcagaaaaagatgataatcatg

SEQ ID NO: 2623 - DNA, 26 bp, Homo sapiens
atagcagaaaaagatgataatcatgg

SEQ ID NO: 2624 - DNA, 26 bp, Homo sapiens
tagcagaaaaagatgataatcatggg

SEQ ID NO: 2625 - DNA, 26 bp, Homo sapiens
agcagaaaaagatgataatcatgggg

SEQ ID NO: 2626 - DNA, 26 bp, Homo sapiens
gcagaaaaagatgataatcatgggga

SEQ ID NO: 2627 - DNA, 26 bp, Homo sapiens
cagaaaaagatgataatcatggggat

SEQ ID NO: 2628 - DNA, 26 bp, Homo sapiens
agaaaaagatgataatcatggggatg

SEQ ID NO: 2629 - DNA, 26 bp, Homo sapiens
gaaaaagatgataatcatggggatgg

SEQ ID NO: 2630 - DNA, 26 bp, Homo sapiens
aaaaagatgataatcatggggatggt

SEQ ID NO: 2631 - DNA, 26 bp, Homo sapiens
aaaagatgataatcatggggatggtg

SEQ ID NO: 2632 - DNA, 26 bp, Homo sapiens
aaagatgataatcatggggatggtga

SEQ ID NO: 2633 - DNA, 26 bp, Homo sapiens
aagatgataatcatggggatggtgaa

SEQ ID NO: 2634 - DNA, 26 bp, Homo sapiens
agatgataatcatggggatggtgaag

SEQ ID NO: 2635 - DNA, 26 bp, Homo sapiens
gatgataatcatggggatggtgaagt

SEQ ID NO: 2636 - DNA, 26 bp, Homo sapiens
atgataatcatggggatggtgaagtg

SEQ ID NO: 2637 - DNA, 26 bp, Homo sapiens
tgataatcatggggatggtgaagtgg

SEQ ID NO: 2638 - DNA, 26 bp, Homo sapiens
gataatcatggggatggtgaagtgga

SEQ ID NO: 2639 - DNA, 26 bp, Homo sapiens
ataatcatggggatggtgaagtggac

SEQ ID NO: 2640 - DNA, 26 bp, Homo sapiens
taatcatggggatggtgaagtggacc

SEQ ID NO: 2641 - DNA, 26 bp, Homo sapiens
aatcatggggatggtgaagtggacca

SEQ ID NO: 2642 - DNA, 26 bp, Homo sapiens
atcatggggatggtgaagtggaccac

SEQ ID NO: 2643 - DNA, 26 bp, Homo sapiens
tcatggggatggtgaagtggaccacg

SEQ ID NO: 2644 - DNA, 26 bp, Homo sapiens
catggggatggtgaagtggaccacga

SEQ ID NO: 2645 - DNA, 26 bp, Homo sapiens
atggggatggtgaagtggaccacgaa

SEQ ID NO: 2646 - DNA, 26 bp, Homo sapiens
tggggatggtgaagtggaccacgaac

SEQ ID NO: 2647 - DNA, 26 bp, Homo sapiens
ggggatggtgaagtggaccacgaaca

SEQ ID NO: 2648 - DNA, 26 bp, Homo sapiens
gggatggtgaagtggaccacgaacat

SEQ ID NO: 2649 - DNA, 26 bp, Homo sapiens
ggatggtgaagtggaccacgaacatg

SEQ ID NO: 2650 - DNA, 26 bp, Homo sapiens
gatggtgaagtggaccacgaacatgt

SEQ ID NO: 2651 - DNA, 26 bp, Homo sapiens
atggtgaagtggaccacgaacatgta

SEQ ID NO: 2652 - DNA, 26 bp, Homo sapiens
tggtgaagtggaccacgaacatgtag

SEQ ID NO: 2653 - DNA, 26 bp, Homo sapiens
ggtgaagtggaccacgaacatgtaga

SEQ ID NO: 2654 - DNA, 26 bp, Homo sapiens
gtgaagtggaccacgaacatgtagat

SEQ ID NO: 2655 - DNA, 26 bp, Homo sapiens
tgaagtggaccacgaacatgtagatg

SEQ ID NO: 2656 - DNA, 26 bp, Homo sapiens
gaagtggaccacgaacatgtagatga

SEQ ID NO: 2657 - DNA, 26 bp, Homo sapiens
aagtggaccacgaacatgtagatgac

SEQ ID NO: 2658 - DNA, 26 bp, Homo sapiens
agtggaccacgaacatgtagatgaca

SEQ ID NO: 2659 - DNA, 26 bp, Homo sapiens
gtggaccacgaacatgtagatgacaa

SEQ ID NO: 2660 - DNA, 26 bp, Homo sapiens
tggaccacgaacatgtagatgacaaa

SEQ ID NO: 2661 - DNA, 26 bp, Homo sapiens
ggaccacgaacatgtagatgacaaaa

SEQ ID NO: 2662 - DNA, 26 bp, Homo sapiens
gaccacgaacatgtagatgacaaaag

SEQ ID NO: 2663 - DNA, 26 bp, Homo sapiens
accacgaacatgtagatgacaaaaga

SEQ ID NO: 2664 - DNA, 26 bp, Homo sapiens
ccacgaacatgtagatgacaaaagac

SEQ ID NO: 2665 - DNA, 26 bp, Homo sapiens
cacgaacatgtagatgacaaaagact

SEQ ID NO: 2666 - DNA, 26 bp, Homo sapiens
acgaacatgtagatgacaaaagactc

SEQ ID NO: 2667 - DNA, 26 bp, Homo sapiens
cgaacatgtagatgacaaaagactcg

SEQ ID NO: 2668 - DNA, 26 bp, Homo sapiens
gaacatgtagatgacaaaagactcgt

SEQ ID NO: 2669 - DNA, 26 bp, Homo sapiens
aacatgtagatgacaaaagactcgtt

SEQ ID NO: 2670 - DNA, 26 bp, Homo sapiens
acatgtagatgacaaaagactcgttg

SEQ ID NO: 2671 - DNA, 26 bp, Homo sapiens
catgtagatgacaaaagactcgttgt

SEQ ID NO: 2672 - DNA, 26 bp, Homo sapiens
atgtagatgacaaaagactcgttgtt

SEQ ID NO: 2673 - DNA, 26 bp, Homo sapiens
tgtagatgacaaaagactcgttgttg

SEQ ID NO: 2674 - DNA, 26 bp, Homo sapiens
gtagatgacaaaagactcgttgttga

SEQ ID NO: 2675 - DNA, 26 bp, Homo sapiens
tagatgacaaaagactcgttgttgac

SEQ ID NO: 2676 - DNA, 26 bp, Homo sapiens
agatgacaaaagactcgttgttgacc

SEQ ID NO: 2677 - DNA, 26 bp, Homo sapiens
gatgacaaaagactcgttgttgacct

SEQ ID NO: 2678 - DNA, 26 bp, Homo sapiens
atgacaaaagactcgttgttgacctc

SEQ ID NO: 2679 - DNA, 26 bp, Homo sapiens
tgacaaaagactcgttgttgacctcc

SEQ ID NO: 2680 - DNA, 26 bp, Homo sapiens
gacaaaagactcgttgttgacctccg

SEQ ID NO: 2681 - DNA, 26 bp, Homo sapiens
acaaaagactcgttgttgacctccgg

SEQ ID NO: 2682 - DNA, 26 bp, Homo sapiens
caaaagactcgttgttgacctccggc

SEQ ID NO: 2683 - DNA, 26 bp, Homo sapiens
aaaagactcgttgttgacctccggct

SEQ ID NO: 2684 - DNA, 26 bp, Homo sapiens
aaagactcgttgttgacctccggctt

SEQ ID NO: 2685 - DNA, 26 bp, Homo sapiens
aagactcgttgttgacctccggcttg

SEQ ID NO: 2686 - DNA, 26 bp, Homo sapiens
agactcgttgttgacctccggcttga

SEQ ID NO: 2687 - DNA, 26 bp, Homo sapiens
gactcgttgttgacctccggcttgag

SEQ ID NO: 2688 - DNA, 26 bp, Homo sapiens
actcgttgttgacctccggcttgagc

SEQ ID NO: 2689 - DNA, 26 bp, Homo sapiens
ctcgttgttgacctccggcttgagcg

SEQ ID NO: 2690 - DNA, 26 bp, Homo sapiens
tcgttgttgacctccggcttgagcgt

SEQ ID NO: 2691 - DNA, 26 bp, Homo sapiens
cgttgttgacctccggcttgagcgtg

SEQ ID NO: 2692 - DNA, 26 bp, Homo sapiens
gttgttgacctccggcttgagcgtgt

SEQ ID NO: 2693 - DNA, 26 bp, Homo sapiens
ttgttgacctccggcttgagcgtgta

SEQ ID NO: 2694 - DNA, 26 bp, Homo sapiens
tgttgacctccggcttgagcgtgtag

SEQ ID NO: 2695 - DNA, 26 bp, Homo sapiens
gttgacctccggcttgagcgtgtagt

SEQ ID NO: 2696 - DNA, 26 bp, Homo sapiens
ttgacctccggcttgagcgtgtagta

SEQ ID NO: 2697 - DNA, 26 bp, Homo sapiens
tgacctccggcttgagcgtgtagtag

SEQ ID NO: 2698 - DNA, 26 bp, Homo sapiens
gacctccggcttgagcgtgtagtagt

SEQ ID NO: 2699 - DNA, 26 bp, Homo sapiens
acctccggcttgagcgtgtagtagtc

SEQ ID NO: 2700 - DNA, 26 bp, Homo sapiens
cctccggcttgagcgtgtagtagtcg

SEQ ID NO: 2701 - DNA, 26 bp, Homo sapiens
ctccggcttgagcgtgtagtagtcga

SEQ ID NO: 2702 - DNA, 26 bp, Homo sapiens
tccggcttgagcgtgtagtagtcgat

SEQ ID NO: 2703 - DNA, 26 bp, Homo sapiens
ccggcttgagcgtgtagtagtcgatt

SEQ ID NO: 2704 - DNA, 26 bp, Homo sapiens
cggcttgagcgtgtagtagtcgattc

SEQ ID NO: 2705 - DNA, 26 bp, Homo sapiens
ggcttgagcgtgtagtagtcgattcc

SEQ ID NO: 2706 - DNA, 26 bp, Homo sapiens
gcttgagcgtgtagtagtcgattcca

SEQ ID NO: 2707 - DNA, 26 bp, Homo sapiens
cttgagcgtgtagtagtcgattccac

SEQ ID NO: 2708 - DNA, 26 bp, Homo sapiens
ttgagcgtgtagtagtcgattccaca

SEQ ID NO: 2709 - DNA, 26 bp, Homo sapiens
tgagcgtgtagtagtcgattccacac

SEQ ID NO: 2710 - DNA, 26 bp, Homo sapiens
gagcgtgtagtagtcgattccacacg

SEQ ID NO: 2711 - DNA, 26 bp, Homo sapiens
agcgtgtagtagtcgattccacacga

SEQ ID NO: 2712 - DNA, 26 bp, Homo sapiens
gcgtgtagtagtcgattccacacgag

SEQ ID NO: 2713 - DNA, 26 bp, Homo sapiens
cgtgtagtagtcgattccacacgagc

SEQ ID NO: 2714 - DNA, 26 bp, Homo sapiens
gtgtagtagtcgattccacacgagca

SEQ ID NO: 2715 - DNA, 26 bp, Homo sapiens
tgtagtagtcgattccacacgagcac

SEQ ID NO: 2716 - DNA, 26 bp, Homo sapiens
gtagtagtcgattccacacgagcact

SEQ ID NO: 2717 - DNA, 26 bp, Homo sapiens
tagtagtcgattccacacgagcactg

SEQ ID NO: 2718 - DNA, 26 bp, Homo sapiens
agtagtcgattccacacgagcactgc

SEQ ID NO: 2719 - DNA, 26 bp, Homo sapiens
gtagtcgattccacacgagcactgca

SEQ ID NO: 2720 - DNA, 26 bp, Homo sapiens
tagtcgattccacacgagcactgcag

SEQ ID NO: 2721 - DNA, 26 bp, Homo sapiens
agtcgattccacacgagcactgcagg

SEQ ID NO: 2722 - DNA, 26 bp, Homo sapiens
gtcgattccacacgagcactgcaggc

SEQ ID NO: 2723 - DNA, 26 bp, Homo sapiens
tcgattccacacgagcactgcaggcc

SEQ ID NO: 2724 - DNA, 26 bp, Homo sapiens
cgattccacacgagcactgcaggccc

SEQ ID NO: 2725 - DNA, 26 bp, Homo sapiens
gattccacacgagcactgcaggccct

SEQ ID NO: 2726 - DNA, 26 bp, Homo sapiens
attccacacgagcactgcaggccctc

SEQ ID NO: 2727 - DNA, 26 bp, Homo sapiens
ttccacacgagcactgcaggccctcg

SEQ ID NO: 2728 - DNA, 26 bp, Homo sapiens
tccacacgagcactgcaggccctcgg

SEQ ID NO: 2729 - DNA, 26 bp, Homo sapiens
ccacacgagcactgcaggccctcggg

SEQ ID NO: 2730 - DNA, 26 bp, Homo sapiens
cacacgagcactgcaggccctcgggg

SEQ ID NO: 2731 - DNA, 26 bp, Homo sapiens
acacgagcactgcaggccctcgggga

SEQ ID NO: 2732 - DNA, 26 bp, Homo sapiens
cacgagcactgcaggccctcggggat

SEQ ID NO: 2733 - DNA, 26 bp, Homo sapiens
acgagcactgcaggccctcggggatg

SEQ ID NO: 2734 - DNA, 26 bp, Homo sapiens
cgagcactgcaggccctcggggatgt

SEQ ID NO: 2735 - DNA, 26 bp, Homo sapiens
gagcactgcaggccctcggggatgta

SEQ ID NO: 2736 - DNA, 26 bp, Homo sapiens
agcactgcaggccctcggggatgtac

SEQ ID NO: 2737 - DNA, 26 bp, Homo sapiens
gcactgcaggccctcggggatgtacc

SEQ ID NO: 2738 - DNA, 26 bp, Homo sapiens
cactgcaggccctcggggatgtacct

SEQ ID NO: 2739 - DNA, 26 bp, Homo sapiens
actgcaggccctcggggatgtacctg

SEQ ID NO: 2740 - DNA, 26 bp, Homo sapiens
ctgcaggccctcggggatgtacctgg

SEQ ID NO: 2741 - DNA, 26 bp, Homo sapiens
tgcaggccctcggggatgtacctgga

SEQ ID NO: 2742 - DNA, 26 bp, Homo sapiens
gcaggccctcggggatgtacctggac

SEQ ID NO: 2743 - DNA, 26 bp, Homo sapiens
caggccctcggggatgtacctggacc

SEQ ID NO: 2744 - DNA, 26 bp, Homo sapiens
aggccctcggggatgtacctggacca

SEQ ID NO: 2745 - DNA, 26 bp, Homo sapiens
ggccctcggggatgtacctggaccag

SEQ ID NO: 2746 - DNA, 26 bp, Homo sapiens
gccctcggggatgtacctggaccagc

SEQ ID NO: 2747 - DNA, 26 bp, Homo sapiens
ccctcggggatgtacctggaccagcc

SEQ ID NO: 2748 - DNA, 26 bp, Homo sapiens
cctcggggatgtacctggaccagccg

SEQ ID NO: 2749 - DNA, 26 bp, Homo sapiens
ctcggggatgtacctggaccagccgg

SEQ ID NO: 2750 - DNA, 26 bp, Homo sapiens
tcggggatgtacctggaccagccggc

SEQ ID NO: 2751 - DNA, 26 bp, Homo sapiens
cggggatgtacctggaccagccggcg

SEQ ID NO: 2752 - DNA, 26 bp, Homo sapiens
ggggatgtacctggaccagccggcga

SEQ ID NO: 2753 - DNA, 26 bp, Homo sapiens
gggatgtacctggaccagccggcgag

SEQ ID NO: 2754 - DNA, 26 bp, Homo sapiens
ggatgtacctggaccagccggcgagt

SEQ ID NO: 2755 - DNA, 26 bp, Homo sapiens
gatgtacctggaccagccggcgagtg

SEQ ID NO: 2756 - DNA, 26 bp, Homo sapiens
atgtacctggaccagccggcgagtgg

SEQ ID NO: 2757 - DNA, 26 bp, Homo sapiens
tgtacctggaccagccggcgagtggg

SEQ ID NO: 2758 - DNA, 26 bp, Homo sapiens
gtacctggaccagccggcgagtgggg

SEQ ID NO: 2759 - DNA, 26 bp, Homo sapiens
tacctggaccagccggcgagtggggg

SEQ ID NO: 2760 - DNA, 26 bp, Homo sapiens
acctggaccagccggcgagtgggggt

SEQ ID NO: 2761 - DNA, 26 bp, Homo sapiens
cctggaccagccggcgagtgggggtg

SEQ ID NO: 2762 - DNA, 26 bp, Homo sapiens
ctggaccagccggcgagtgggggtgc

SEQ ID NO: 2763 - DNA, 26 bp, Homo sapiens
tggaccagccggcgagtgggggtgcg

SEQ ID NO: 2764 - DNA, 26 bp, Homo sapiens
ggaccagccggcgagtgggggtgcgg

SEQ ID NO: 2765 - DNA, 26 bp, Homo sapiens
gaccagccggcgagtgggggtgcggc

SEQ ID NO: 2766 - DNA, 26 bp, Homo sapiens
accagccggcgagtgggggtgcggcg

SEQ ID NO: 2767 - DNA, 26 bp, Homo sapiens
ccagccggcgagtgggggtgcggcgc

SEQ ID NO: 2768 - DNA, 26 bp, Homo sapiens
cagccggcgagtgggggtgcggcgca

SEQ ID NO: 2769 - DNA, 26 bp, Homo sapiens
agccggcgagtgggggtgcggcgcag

SEQ ID NO: 2770 - DNA, 26 bp, Homo sapiens
gccggcgagtgggggtgcggcgcagg

SEQ ID NO: 2771 - DNA, 26 bp, Homo sapiens
ccggcgagtgggggtgcggcgcaggc

SEQ ID NO: 2772 - DNA, 26 bp, Homo sapiens
cggcgagtgggggtgcggcgcaggcc

SEQ ID NO: 2773 - DNA, 26 bp, Homo sapiens
ggcgagtgggggtgcggcgcaggcca

SEQ ID NO: 2774 - DNA, 26 bp, Homo sapiens
gcgagtgggggtgcggcgcaggccag

SEQ ID NO: 2775 - DNA, 26 bp, Homo sapiens
cgagtgggggtgcggcgcaggccagc

SEQ ID NO: 2776 - DNA, 26 bp, Homo sapiens
gagtgggggtgcggcgcaggccagcg

SEQ ID NO: 2777 - DNA, 26 bp, Homo sapiens
agtgggggtgcggcgcaggccagcgc

SEQ ID NO: 2778 - DNA, 26 bp, Homo sapiens
gtgggggtgcggcgcaggccagcgcc

SEQ ID NO: 2779 - DNA, 26 bp, Homo sapiens
tgggggtgcggcgcaggccagcgcca

SEQ ID NO: 2780 - DNA, 26 bp, Homo sapiens
gggggtgcggcgcaggccagcgccat

SEQ ID NO: 2781 - DNA, 26 bp, Homo sapiens
ggggtgcggcgcaggccagcgccatg

SEQ ID NO: 2782 - DNA, 26 bp, Homo sapiens
gggtgcggcgcaggccagcgccatga

SEQ ID NO: 2783 - DNA, 26 bp, Homo sapiens
ggtgcggcgcaggccagcgccatgac

SEQ ID NO: 2784 - DNA, 26 bp, Homo sapiens
gtgcggcgcaggccagcgccatgacc

SEQ ID NO: 2785 - DNA, 26 bp, Homo sapiens
tgcggcgcaggccagcgccatgaccc

SEQ ID NO: 2786 - DNA, 26 bp, Homo sapiens
gcggcgcaggccagcgccatgaccca

SEQ ID NO: 2787 - DNA, 26 bp, Homo sapiens
cggcgcaggccagcgccatgacccag

SEQ ID NO: 2788 - DNA, 26 bp, Homo sapiens
ggcgcaggccagcgccatgacccagg

SEQ ID NO: 2789 - DNA, 26 bp, Homo sapiens
gcgcaggccagcgccatgacccaggt

SEQ ID NO: 2790 - DNA, 26 bp, Homo sapiens
cgcaggccagcgccatgacccaggtg

SEQ ID NO: 2791 - DNA, 26 bp, Homo sapiens
gcaggccagcgccatgacccaggtga

SEQ ID NO: 2792 - DNA, 26 bp, Homo sapiens
caggccagcgccatgacccaggtgaa

SEQ ID NO: 2793 - DNA, 26 bp, Homo sapiens
aggccagcgccatgacccaggtgaag

SEQ ID NO: 2794 - DNA, 26 bp, Homo sapiens
ggccagcgccatgacccaggtgaagg

SEQ ID NO: 2795 - DNA, 26 bp, Homo sapiens
gccagcgccatgacccaggtgaaggc

SEQ ID NO: 2796 - DNA, 26 bp, Homo sapiens
ccagcgccatgacccaggtgaaggca

SEQ ID NO: 2797 - DNA, 26 bp, Homo sapiens
cagcgccatgacccaggtgaaggcaa

SEQ ID NO: 2798 - DNA, 26 bp, Homo sapiens
agcgccatgacccaggtgaaggcaac

SEQ ID NO: 2799 - DNA, 26 bp, Homo sapiens
gcgccatgacccaggtgaaggcaacg

SEQ ID NO: 2800 - DNA, 26 bp, Homo sapiens
cgccatgacccaggtgaaggcaacgc

SEQ ID NO: 2801 - DNA, 26 bp, Homo sapiens
gccatgacccaggtgaaggcaacgcc

SEQ ID NO: 2802 - DNA, 26 bp, Homo sapiens
ccatgacccaggtgaaggcaacgccc

SEQ ID NO: 2803 - DNA, 26 bp, Homo sapiens
catgacccaggtgaaggcaacgccca

SEQ ID NO: 2804 - DNA, 26 bp, Homo sapiens
atgacccaggtgaaggcaacgcccat

SEQ ID NO: 2805 - DNA, 26 bp, Homo sapiens
tgacccaggtgaaggcaacgcccatg

SEQ ID NO: 2806 - DNA, 26 bp, Homo sapiens
gacccaggtgaaggcaacgcccatga

SEQ ID NO: 2807 - DNA, 26 bp, Homo sapiens
acccaggtgaaggcaacgcccatgat

SEQ ID NO: 2808 - DNA, 26 bp, Homo sapiens
cccaggtgaaggcaacgcccatgatg

SEQ ID NO: 2809 - DNA, 26 bp, Homo sapiens
ccaggtgaaggcaacgcccatgatgg

SEQ ID NO: 2810 - DNA, 26 bp, Homo sapiens
caggtgaaggcaacgcccatgatggc

SEQ ID NO: 2811 - DNA, 26 bp, Homo sapiens
aggtgaaggcaacgcccatgatggca

SEQ ID NO: 2812 - DNA, 26 bp, Homo sapiens
ggtgaaggcaacgcccatgatggcat

SEQ ID NO: 2813 - DNA, 26 bp, Homo sapiens
gtgaaggcaacgcccatgatggcatg

SEQ ID NO: 2814 - DNA, 26 bp, Homo sapiens
tgaaggcaacgcccatgatggcatgg

SEQ ID NO: 2815 - DNA, 26 bp, Homo sapiens
gaaggcaacgcccatgatggcatggt

SEQ ID NO: 2816 - DNA, 26 bp, Homo sapiens
aaggcaacgcccatgatggcatggtt

SEQ ID NO: 2817 - DNA, 26 bp, Homo sapiens
aggcaacgcccatgatggcatggttc

SEQ ID NO: 2818 - DNA, 26 bp, Homo sapiens
ggcaacgcccatgatggcatggttct

SEQ ID NO: 2819 - DNA, 26 bp, Homo sapiens
gcaacgcccatgatggcatggttctc

SEQ ID NO: 2820 - DNA, 26 bp, Homo sapiens
caacgcccatgatggcatggttctcc

SEQ ID NO: 2821 - DNA, 26 bp, Homo sapiens
aacgcccatgatggcatggttctccc

SEQ ID NO: 2822 - DNA, 26 bp, Homo sapiens
acgcccatgatggcatggttctcccc

SEQ ID NO: 2823 - DNA, 26 bp, Homo sapiens
cgcccatgatggcatggttctccccg

SEQ ID NO: 2824 - DNA, 26 bp, Homo sapiens
gcccatgatggcatggttctccccga

SEQ ID NO: 2825 - DNA, 26 bp, Homo sapiens
cccatgatggcatggttctccccgaa

SEQ ID NO: 2826 - DNA, 26 bp, Homo sapiens
ccatgatggcatggttctccccgaag

SEQ ID NO: 2827 - DNA, 26 bp, Homo sapiens
catgatggcatggttctccccgaagc

SEQ ID NO: 2828 - DNA, 26 bp, Homo sapiens
atgatggcatggttctccccgaagcg

SEQ ID NO: 2829 - DNA, 26 bp, Homo sapiens
tgatggcatggttctccccgaagcgg

SEQ ID NO: 2830 - DNA, 26 bp, Homo sapiens
gatggcatggttctccccgaagcgga

SEQ ID NO: 2831 - DNA, 26 bp, Homo sapiens
atggcatggttctccccgaagcggaa

SEQ ID NO: 2832 - DNA, 26 bp, Homo sapiens
tggcatggttctccccgaagcggaag

SEQ ID NO: 2833 - DNA, 26 bp, Homo sapiens
ggcatggttctccccgaagcggaagt

SEQ ID NO: 2834 - DNA, 26 bp, Homo sapiens
gcatggttctccccgaagcggaagtt

SEQ ID NO: 2835 - DNA, 26 bp, Homo sapiens
catggttctccccgaagcggaagttg

SEQ ID NO: 2836 - DNA, 26 bp, Homo sapiens
atggttctccccgaagcggaagttgc

SEQ ID NO: 2837 - DNA, 26 bp, Homo sapiens
tggttctccccgaagcggaagttgct

SEQ ID NO: 2838 - DNA, 26 bp, Homo sapiens
ggttctccccgaagcggaagttgctc

SEQ ID NO: 2839 - DNA, 26 bp, Homo sapiens
gttctccccgaagcggaagttgctca

SEQ ID NO: 2840 - DNA, 26 bp, Homo sapiens
ttctccccgaagcggaagttgctcat

SEQ ID NO: 2841 - DNA, 26 bp, Homo sapiens
tctccccgaagcggaagttgctcatg

SEQ ID NO: 2842 - DNA, 26 bp, Homo sapiens
ctccccgaagcggaagttgctcatgg

SEQ ID NO: 2843 - DNA, 26 bp, Homo sapiens
tccccgaagcggaagttgctcatggg

SEQ ID NO: 2844 - DNA, 26 bp, Homo sapiens
ccccgaagcggaagttgctcatgggc

SEQ ID NO: 2845 - DNA, 26 bp, Homo sapiens
cccgaagcggaagttgctcatgggct

SEQ ID NO: 2846 - DNA, 26 bp, Homo sapiens
ccgaagcggaagttgctcatgggctt

SEQ ID NO: 2847 - DNA, 26 bp, Homo sapiens
cgaagcggaagttgctcatgggctta

SEQ ID NO: 2848 - DNA, 26 bp, Homo sapiens
gaagcggaagttgctcatgggcttac

SEQ ID NO: 2849 - DNA, 26 bp, Homo sapiens
aagcggaagttgctcatgggcttaca

SEQ ID NO: 2850 - DNA, 26 bp, Homo sapiens
agcggaagttgctcatgggcttacac

SEQ ID NO: 2851 - DNA, 26 bp, Homo sapiens
gcggaagttgctcatgggcttacaca

SEQ ID NO: 2852 - DNA, 26 bp, Homo sapiens
cggaagttgctcatgggcttacacac

SEQ ID NO: 2853 - DNA, 26 bp, Homo sapiens
ggaagttgctcatgggcttacacacc

SEQ ID NO: 2854 - DNA, 26 bp, Homo sapiens
gaagttgctcatgggcttacacacca

SEQ ID NO: 2855 - DNA, 26 bp, Homo sapiens
aagttgctcatgggcttacacaccac

SEQ ID NO: 2856 - DNA, 26 bp, Homo sapiens
agttgctcatgggcttacacaccacc

SEQ ID NO: 2857 - DNA, 26 bp, Homo sapiens
gttgctcatgggcttacacaccacca

SEQ ID NO: 2858 - DNA, 26 bp, Homo sapiens
ttgctcatgggcttacacaccaccac

SEQ ID NO: 2859 - DNA, 26 bp, Homo sapiens
tgctcatgggcttacacaccaccacg

SEQ ID NO: 2860 - DNA, 26 bp, Homo sapiens
gctcatgggcttacacaccaccacgt

SEQ ID NO: 2861 - DNA, 26 bp, Homo sapiens
ctcatgggcttacacaccaccacgta

SEQ ID NO: 2862 - DNA, 26 bp, Homo sapiens
tcatgggcttacacaccaccacgtac

SEQ ID NO: 2863 - DNA, 26 bp, Homo sapiens
catgggcttacacaccaccacgtacc

SEQ ID NO: 2864 - DNA, 26 bp, Homo sapiens
atgggcttacacaccaccacgtaccg

SEQ ID NO: 2865 - DNA, 26 bp, Homo sapiens
tgggcttacacaccaccacgtaccgc

SEQ ID NO: 2866 - DNA, 26 bp, Homo sapiens
gggcttacacaccaccacgtaccgct

SEQ ID NO: 2867 - DNA, 26 bp, Homo sapiens
ggcttacacaccaccacgtaccgctc

SEQ ID NO: 2868 - DNA, 26 bp, Homo sapiens
gcttacacaccaccacgtaccgctcg

SEQ ID NO: 2869 - DNA, 26 bp, Homo sapiens
cttacacaccaccacgtaccgctcga

SEQ ID NO: 2870 - DNA, 26 bp, Homo sapiens
ttacacaccaccacgtaccgctcgat

SEQ ID NO: 2871 - DNA, 26 bp, Homo sapiens
tacacaccaccacgtaccgctcgatg

SEQ ID NO: 2872 - DNA, 26 bp, Homo sapiens
acacaccaccacgtaccgctcgatgg

SEQ ID NO: 2873 - DNA, 26 bp, Homo sapiens
cacaccaccacgtaccgctcgatggc

SEQ ID NO: 2874 - DNA, 26 bp, Homo sapiens
acaccaccacgtaccgctcgatggcc

SEQ ID NO: 2875 - DNA, 26 bp, Homo sapiens
caccaccacgtaccgctcgatggcca

SEQ ID NO: 2876 - DNA, 26 bp, Homo sapiens
accaccacgtaccgctcgatggccag

SEQ ID NO: 2877 - DNA, 26 bp, Homo sapiens
ccaccacgtaccgctcgatggccagg

SEQ ID NO: 2878 - DNA, 26 bp, Homo sapiens
caccacgtaccgctcgatggccagga

SEQ ID NO: 2879 - DNA, 26 bp, Homo sapiens
accacgtaccgctcgatggccaggac

SEQ ID NO: 2880 - DNA, 26 bp, Homo sapiens
ccacgtaccgctcgatggccaggacc

SEQ ID NO: 2881 - DNA, 26 bp, Homo sapiens
cacgtaccgctcgatggccaggacca

SEQ ID NO: 2882 - DNA, 26 bp, Homo sapiens
acgtaccgctcgatggccaggaccac

SEQ ID NO: 2883 - DNA, 26 bp, Homo sapiens
cgtaccgctcgatggccaggaccacc

SEQ ID NO: 2884 - DNA, 26 bp, Homo sapiens
gtaccgctcgatggccaggaccacca

SEQ ID NO: 2885 - DNA, 26 bp, Homo sapiens
taccgctcgatggccaggaccaccaa

SEQ ID NO: 2886 - DNA, 26 bp, Homo sapiens
accgctcgatggccaggaccaccaag

SEQ ID NO: 2887 - DNA, 26 bp, Homo sapiens
ccgctcgatggccaggaccaccaagg

SEQ ID NO: 2888 - DNA, 26 bp, Homo sapiens
cgctcgatggccaggaccaccaagga

SEQ ID NO: 2889 - DNA, 26 bp, Homo sapiens
gctcgatggccaggaccaccaaggac

SEQ ID NO: 2890 - DNA, 26 bp, Homo sapiens
ctcgatggccaggaccaccaaggacc

SEQ ID NO: 2891 - DNA, 26 bp, Homo sapiens
tcgatggccaggaccaccaaggacca

SEQ ID NO: 2892 - DNA, 26 bp, Homo sapiens
cgatggccaggaccaccaaggaccac

SEQ ID NO: 2893 - DNA, 26 bp, Homo sapiens
gatggccaggaccaccaaggaccaca

SEQ ID NO: 2894 - DNA, 26 bp, Homo sapiens
atggccaggaccaccaaggaccacag

SEQ ID NO: 2895 - DNA, 26 bp, Homo sapiens
tggccaggaccaccaaggaccacagg

SEQ ID NO: 2896 - DNA, 26 bp, Homo sapiens
ggccaggaccaccaaggaccacaggg

SEQ ID NO: 2897 - DNA, 26 bp, Homo sapiens
gccaggaccaccaaggaccacagggc

SEQ ID NO: 2898 - DNA, 26 bp, Homo sapiens
ccaggaccaccaaggaccacagggca

SEQ ID NO: 2899 - DNA, 26 bp, Homo sapiens
caggaccaccaaggaccacagggcaa

SEQ ID NO: 2900 - DNA, 26 bp, Homo sapiens
aggaccaccaaggaccacagggcaat

SEQ ID NO: 2901 - DNA, 26 bp, Homo sapiens
ggaccaccaaggaccacagggcaatt

SEQ ID NO: 2902 - DNA, 26 bp, Homo sapiens
gaccaccaaggaccacagggcaattt

SEQ ID NO: 2903 - DNA, 26 bp, Homo sapiens
accaccaaggaccacagggcaatttc

SEQ ID NO: 2904 - DNA, 26 bp, Homo sapiens
ccaccaaggaccacagggcaatttca

SEQ ID NO: 2905 - DNA, 26 bp, Homo sapiens
caccaaggaccacagggcaatttcac

SEQ ID NO: 2906 - DNA, 26 bp, Homo sapiens
accaaggaccacagggcaatttcacc

SEQ ID NO: 2907 - DNA, 26 bp, Homo sapiens
ccaaggaccacagggcaatttcaccg

SEQ ID NO: 2908 - DNA, 26 bp, Homo sapiens
caaggaccacagggcaatttcaccgc

SEQ ID NO: 2909 - DNA, 26 bp, Homo sapiens
aaggaccacagggcaatttcaccgcc

SEQ ID NO: 2910 - DNA, 26 bp, Homo sapiens
aggaccacagggcaatttcaccgccc

SEQ ID NO: 2911 - DNA, 26 bp, Homo sapiens
ggaccacagggcaatttcaccgccca

SEQ ID NO: 2912 - DNA, 26 bp, Homo sapiens
gaccacagggcaatttcaccgcccag

SEQ ID NO: 2913 - DNA, 26 bp, Homo sapiens
accacagggcaatttcaccgcccagg

SEQ ID NO: 2914 - DNA, 26 bp, Homo sapiens
ccacagggcaatttcaccgcccaggg

SEQ ID NO: 2915 - DNA, 26 bp, Homo sapiens
cacagggcaatttcaccgcccagggt

SEQ ID NO: 2916 - DNA, 26 bp, Homo sapiens
acagggcaatttcaccgcccagggtg

SEQ ID NO: 2917 - DNA, 26 bp, Homo sapiens
cagggcaatttcaccgcccagggtgg

SEQ ID NO: 2918 - DNA, 26 bp, Homo sapiens
agggcaatttcaccgcccagggtggc

SEQ ID NO: 2919 - DNA, 26 bp, Homo sapiens
gggcaatttcaccgcccagggtggca

SEQ ID NO: 2920 - DNA, 26 bp, Homo sapiens
ggcaatttcaccgcccagggtggcaa

SEQ ID NO: 2921 - DNA, 26 bp, Homo sapiens
gcaatttcaccgcccagggtggcaaa

SEQ ID NO: 2922 - DNA, 26 bp, Homo sapiens
caatttcaccgcccagggtggcaaag

SEQ ID NO: 2923 - DNA, 26 bp, Homo sapiens
aatttcaccgcccagggtggcaaaga

SEQ ID NO: 2924 - DNA, 26 bp, Homo sapiens
atttcaccgcccagggtggcaaagaa

SEQ ID NO: 2925 - DNA, 26 bp, Homo sapiens
tttcaccgcccagggtggcaaagaag

SEQ ID NO: 2926 - DNA, 26 bp, Homo sapiens
ttcaccgcccagggtggcaaagaagc

SEQ ID NO: 2927 - DNA, 26 bp, Homo sapiens
tcaccgcccagggtggcaaagaagcc

SEQ ID NO: 2928 - DNA, 26 bp, Homo sapiens
caccgcccagggtggcaaagaagccc

SEQ ID NO: 2929 - DNA, 26 bp, Homo sapiens
accgcccagggtggcaaagaagccct

SEQ ID NO: 2930 - DNA, 26 bp, Homo sapiens
ccgcccagggtggcaaagaagccctc

SEQ ID NO: 2931 - DNA, 26 bp, Homo sapiens
cgcccagggtggcaaagaagccctcc

SEQ ID NO: 2932 - DNA, 26 bp, Homo sapiens
gcccagggtggcaaagaagccctcca

SEQ ID NO: 2933 - DNA, 26 bp, Homo sapiens
cccagggtggcaaagaagccctccaa

SEQ ID NO: 2934 - DNA, 26 bp, Homo sapiens
ccagggtggcaaagaagccctccaaa

SEQ ID NO: 2935 - DNA, 26 bp, Homo sapiens
cagggtggcaaagaagccctccaaat

SEQ ID NO: 2936 - DNA, 26 bp, Homo sapiens
agggtggcaaagaagccctccaaatt

SEQ ID NO: 2937 - DNA, 26 bp, Homo sapiens
gggtggcaaagaagccctccaaattg

SEQ ID NO: 2938 - DNA, 26 bp, Homo sapiens
ggtggcaaagaagccctccaaattgc

SEQ ID NO: 2939 - DNA, 26 bp, Homo sapiens
gtggcaaagaagccctccaaattgca

SEQ ID NO: 2940 - DNA, 26 bp, Homo sapiens
tggcaaagaagccctccaaattgcat

SEQ ID NO: 2941 - DNA, 26 bp, Homo sapiens
ggcaaagaagccctccaaattgcatc

SEQ ID NO: 2942 - DNA, 26 bp, Homo sapiens
gcaaagaagccctccaaattgcatcc

SEQ ID NO: 2943 - DNA, 26 bp, Homo sapiens
caaagaagccctccaaattgcatcct

SEQ ID NO: 2944 - DNA, 26 bp, Homo sapiens
aaagaagccctccaaattgcatcctg

SEQ ID NO: 2945 - DNA, 26 bp, Homo sapiens
aagaagccctccaaattgcatcctgt

SEQ ID NO: 2946 - DNA, 26 bp, Homo sapiens
agaagccctccaaattgcatcctgtg

SEQ ID NO: 2947 - DNA, 26 bp, Homo sapiens
gaagccctccaaattgcatcctgtgg

SEQ ID NO: 2948 - DNA, 26 bp, Homo sapiens
aagccctccaaattgcatcctgtggg

SEQ ID NO: 2949 - DNA, 26 bp, Homo sapiens
agccctccaaattgcatcctgtgggc

SEQ ID NO: 2950 - DNA, 26 bp, Homo sapiens
gccctccaaattgcatcctgtgggcc

SEQ ID NO: 2951 - DNA, 26 bp, Homo sapiens
ccctccaaattgcatcctgtgggccc

SEQ ID NO: 2952 - DNA, 26 bp, Homo sapiens
cctccaaattgcatcctgtgggcccg

SEQ ID NO: 2953 - DNA, 26 bp, Homo sapiens
ctccaaattgcatcctgtgggcccga

SEQ ID NO: 2954 - DNA, 26 bp, Homo sapiens
tccaaattgcatcctgtgggcccgaa

SEQ ID NO: 2955 - DNA, 26 bp, Homo sapiens
ccaaattgcatcctgtgggcccgaag

SEQ ID NO: 2956 - DNA, 26 bp, Homo sapiens
caaattgcatcctgtgggcccgaaga

SEQ ID NO: 2957 - DNA, 26 bp, Homo sapiens
aaattgcatcctgtgggcccgaagac

SEQ ID NO: 2958 - DNA, 26 bp, Homo sapiens
aattgcatcctgtgggcccgaagacg

SEQ ID NO: 2959 - DNA, 26 bp, Homo sapiens
attgcatcctgtgggcccgaagacga

SEQ ID NO: 2960 - DNA, 26 bp, Homo sapiens
ttgcatcctgtgggcccgaagacgaa

SEQ ID NO: 2961 - DNA, 26 bp, Homo sapiens
tgcatcctgtgggcccgaagacgaag

SEQ ID NO: 2962 - DNA, 26 bp, Homo sapiens
gcatcctgtgggcccgaagacgaagt

SEQ ID NO: 2963 - DNA, 26 bp, Homo sapiens
catcctgtgggcccgaagacgaagta

SEQ ID NO: 2964 - DNA, 26 bp, Homo sapiens
atcctgtgggcccgaagacgaagtat

SEQ ID NO: 2965 - DNA, 26 bp, Homo sapiens
tcctgtgggcccgaagacgaagtatc

SEQ ID NO: 2966 - DNA, 26 bp, Homo sapiens
cctgtgggcccgaagacgaagtatcc

SEQ ID NO: 2967 - DNA, 26 bp, Homo sapiens
ctgtgggcccgaagacgaagtatcca

SEQ ID NO: 2968 - DNA, 26 bp, Homo sapiens
tgtgggcccgaagacgaagtatccat

SEQ ID NO: 2969 - DNA, 26 bp, Homo sapiens
gtgggcccgaagacgaagtatccatg

SEQ ID NO: 2970 - DNA, 26 bp, Homo sapiens
tgggcccgaagacgaagtatccatgc

SEQ ID NO: 2971 - DNA, 26 bp, Homo sapiens
gggcccgaagacgaagtatccatgca

SEQ ID NO: 2972 - DNA, 26 bp, Homo sapiens
ggcccgaagacgaagtatccatgcag

SEQ ID NO: 2973 - DNA, 26 bp, Homo sapiens
gcccgaagacgaagtatccatgcaga

SEQ ID NO: 2974 - DNA, 26 bp, Homo sapiens
cccgaagacgaagtatccatgcagag

SEQ ID NO: 2975 - DNA, 26 bp, Homo sapiens
ccgaagacgaagtatccatgcagaga

SEQ ID NO: 2976 - DNA, 26 bp, Homo sapiens
cgaagacgaagtatccatgcagagag

SEQ ID NO: 2977 - DNA, 26 bp, Homo sapiens
gaagacgaagtatccatgcagagagg

SEQ ID NO: 2978 - DNA, 26 bp, Homo sapiens
aagacgaagtatccatgcagagaggt

SEQ ID NO: 2979 - DNA, 26 bp, Homo sapiens
agacgaagtatccatgcagagaggtg

SEQ ID NO: 2980 - DNA, 26 bp, Homo sapiens
gacgaagtatccatgcagagaggtgt

SEQ ID NO: 2981 - DNA, 26 bp, Homo sapiens
acgaagtatccatgcagagaggtgta

SEQ ID NO: 2982 - DNA, 26 bp, Homo sapiens
cgaagtatccatgcagagaggtgtag

SEQ ID NO: 2983 - DNA, 26 bp, Homo sapiens
gaagtatccatgcagagaggtgtaga

SEQ ID NO: 2984 - DNA, 26 bp, Homo sapiens
aagtatccatgcagagaggtgtagag

SEQ ID NO: 2985 - DNA, 26 bp, Homo sapiens
agtatccatgcagagaggtgtagagg

SEQ ID NO: 2986 - DNA, 26 bp, Homo sapiens
gtatccatgcagagaggtgtagaggg

SEQ ID NO: 2987 - DNA, 26 bp, Homo sapiens
tatccatgcagagaggtgtagagggt

SEQ ID NO: 2988 - DNA, 26 bp, Homo sapiens
atccatgcagagaggtgtagagggtg

SEQ ID NO: 2989 - DNA, 26 bp, Homo sapiens
tccatgcagagaggtgtagagggtgc

SEQ ID NO: 2990 - DNA, 26 bp, Homo sapiens
ccatgcagagaggtgtagagggtgct

SEQ ID NO: 2991 - DNA, 26 bp, Homo sapiens
catgcagagaggtgtagagggtgctg

SEQ ID NO: 2992 - DNA, 26 bp, Homo sapiens
atgcagagaggtgtagagggtgctgg

SEQ ID NO: 2993 - DNA, 26 bp, Homo sapiens
tgcagagaggtgtagagggtgctggt

SEQ ID NO: 2994 - DNA, 26 bp, Homo sapiens
gcagagaggtgtagagggtgctggtg

SEQ ID NO: 2995 - DNA, 26 bp, Homo sapiens
cagagaggtgtagagggtgctggtga

SEQ ID NO: 2996 - DNA, 26 bp, Homo sapiens
agagaggtgtagagggtgctggtgaa

SEQ ID NO: 2997 - DNA, 26 bp, Homo sapiens
gagaggtgtagagggtgctggtgaag

SEQ ID NO: 2998 - DNA, 26 bp, Homo sapiens
agaggtgtagagggtgctggtgaagc

SEQ ID NO: 2999 - DNA, 26 bp, Homo sapiens
gaggtgtagagggtgctggtgaagcc

SEQ ID NO: 3000 - DNA, 26 bp, Homo sapiens
aggtgtagagggtgctggtgaagcca

SEQ ID NO: 3001 - DNA, 26 bp, Homo sapiens
ggtgtagagggtgctggtgaagccac

SEQ ID NO: 3002 - DNA, 26 bp, Homo sapiens
gtgtagagggtgctggtgaagccacc

SEQ ID NO: 3003 - DNA, 26 bp, Homo sapiens
tgtagagggtgctggtgaagccacct

SEQ ID NO: 3004 - DNA, 26 bp, Homo sapiens
gtagagggtgctggtgaagccaccta

SEQ ID NO: 3005 - DNA, 26 bp, Homo sapiens
tagagggtgctggtgaagccacctag

SEQ ID NO: 3006 - DNA, 26 bp, Homo sapiens
agagggtgctggtgaagccacctagg

SEQ ID NO: 3007 - DNA, 26 bp, Homo sapiens
gagggtgctggtgaagccacctagga

SEQ ID NO: 3008 - DNA, 26 bp, Homo sapiens
agggtgctggtgaagccacctaggac

SEQ ID NO: 3009 - DNA, 26 bp, Homo sapiens
gggtgctggtgaagccacctaggacc

SEQ ID NO: 3010 - DNA, 26 bp, Homo sapiens
ggtgctggtgaagccacctaggacca

SEQ ID NO: 3011 - DNA, 26 bp, Homo sapiens
gtgctggtgaagccacctaggaccat

SEQ ID NO: 3012 - DNA, 26 bp, Homo sapiens
tgctggtgaagccacctaggaccatg

SEQ ID NO: 3013 - DNA, 26 bp, Homo sapiens
gctggtgaagccacctaggaccatga

SEQ ID NO: 3014 - DNA, 26 bp, Homo sapiens
ctggtgaagccacctaggaccatgaa

SEQ ID NO: 3015 - DNA, 26 bp, Homo sapiens
tggtgaagccacctaggaccatgaag

SEQ ID NO: 3016 - DNA, 26 bp, Homo sapiens
ggtgaagccacctaggaccatgaaga

SEQ ID NO: 3017 - DNA, 26 bp, Homo sapiens
gtgaagccacctaggaccatgaagag

SEQ ID NO: 3018 - DNA, 26 bp, Homo sapiens
tgaagccacctaggaccatgaagagg

SEQ ID NO: 3019 - DNA, 26 bp, Homo sapiens
gaagccacctaggaccatgaagaggt

SEQ ID NO: 3020 - DNA, 26 bp, Homo sapiens
aagccacctaggaccatgaagaggtc

SEQ ID NO: 3021 - DNA, 26 bp, Homo sapiens
agccacctaggaccatgaagaggtca

SEQ ID NO: 3022 - DNA, 26 bp, Homo sapiens
gccacctaggaccatgaagaggtcag

SEQ ID NO: 3023 - DNA, 26 bp, Homo sapiens
ccacctaggaccatgaagaggtcagc

SEQ ID NO: 3024 - DNA, 26 bp, Homo sapiens
cacctaggaccatgaagaggtcagcc

SEQ ID NO: 3025 - DNA, 26 bp, Homo sapiens
acctaggaccatgaagaggtcagcca

SEQ ID NO: 3026 - DNA, 26 bp, Homo sapiens
cctaggaccatgaagaggtcagccac

SEQ ID NO: 3027 - DNA, 26 bp, Homo sapiens
ctaggaccatgaagaggtcagccacg

SEQ ID NO: 3028 - DNA, 26 bp, Homo sapiens
taggaccatgaagaggtcagccacgg

SEQ ID NO: 3029 - DNA, 26 bp, Homo sapiens
aggaccatgaagaggtcagccacggc

SEQ ID NO: 3030 - DNA, 26 bp, Homo sapiens
ggaccatgaagaggtcagccacggct

SEQ ID NO: 3031 - DNA, 26 bp, Homo sapiens
gaccatgaagaggtcagccacggcta

SEQ ID NO: 3032 - DNA, 26 bp, Homo sapiens
accatgaagaggtcagccacggctag

SEQ ID NO: 3033 - DNA, 26 bp, Homo sapiens
ccatgaagaggtcagccacggctagg

SEQ ID NO: 3034 - DNA, 26 bp, Homo sapiens
catgaagaggtcagccacggctaggt

SEQ ID NO: 3035 - DNA, 26 bp, Homo sapiens
atgaagaggtcagccacggctaggtt

SEQ ID NO: 3036 - DNA, 26 bp, Homo sapiens
tgaagaggtcagccacggctaggttg

SEQ ID NO: 3037 - DNA, 26 bp, Homo sapiens
gaagaggtcagccacggctaggttga

SEQ ID NO: 3038 - DNA, 26 bp, Homo sapiens
aagaggtcagccacggctaggttgag

SEQ ID NO: 3039 - DNA, 26 bp, Homo sapiens
agaggtcagccacggctaggttgagc

SEQ ID NO: 3040 - DNA, 26 bp, Homo sapiens
gaggtcagccacggctaggttgagca

SEQ ID NO: 3041 - DNA, 26 bp, Homo sapiens
aggtcagccacggctaggttgagcag

SEQ ID NO: 3042 - DNA, 26 bp, Homo sapiens
ggtcagccacggctaggttgagcagg

SEQ ID NO: 3043 - DNA, 26 bp, Homo sapiens
gtcagccacggctaggttgagcagga

SEQ ID NO: 3044 - DNA, 26 bp, Homo sapiens
tcagccacggctaggttgagcaggat

SEQ ID NO: 3045 - DNA, 26 bp, Homo sapiens
cagccacggctaggttgagcaggatg

SEQ ID NO: 3046 - DNA, 26 bp, Homo sapiens
agccacggctaggttgagcaggatgt

SEQ ID NO: 3047 - DNA, 26 bp, Homo sapiens
gccacggctaggttgagcaggatgta

SEQ ID NO: 3048 - DNA, 26 bp, Homo sapiens
ccacggctaggttgagcaggatgtag

SEQ ID NO: 3049 - DNA, 26 bp, Homo sapiens
cacggctaggttgagcaggatgtagt

SEQ ID NO: 3050 - DNA, 26 bp, Homo sapiens
acggctaggttgagcaggatgtagtt

SEQ ID NO: 3051 - DNA, 26 bp, Homo sapiens
cggctaggttgagcaggatgtagttg

SEQ ID NO: 3052 - DNA, 26 bp, Homo sapiens
ggctaggttgagcaggatgtagttga

SEQ ID NO: 3053 - DNA, 26 bp, Homo sapiens
gctaggttgagcaggatgtagttgag

SEQ ID NO: 3054 - DNA, 26 bp, Homo sapiens
ctaggttgagcaggatgtagttgaga

SEQ ID NO: 3055 - DNA, 26 bp, Homo sapiens
taggttgagcaggatgtagttgagag

SEQ ID NO: 3056 - DNA, 26 bp, Homo sapiens
aggttgagcaggatgtagttgagagg

SEQ ID NO: 3057 - DNA, 26 bp, Homo sapiens
ggttgagcaggatgtagttgagaggc

SEQ ID NO: 3058 - DNA, 26 bp, Homo sapiens
gttgagcaggatgtagttgagaggcg

SEQ ID NO: 3059 - DNA, 26 bp, Homo sapiens
ttgagcaggatgtagttgagaggcgt

SEQ ID NO: 3060 - DNA, 26 bp, Homo sapiens
tgagcaggatgtagttgagaggcgtg

SEQ ID NO: 3061 - DNA, 26 bp, Homo sapiens
gagcaggatgtagttgagaggcgtgc

SEQ ID NO: 3062 - DNA, 26 bp, Homo sapiens
agcaggatgtagttgagaggcgtgcg

SEQ ID NO: 3063 - DNA, 26 bp, Homo sapiens
gcaggatgtagttgagaggcgtgcgc

SEQ ID NO: 3064 - DNA, 26 bp, Homo sapiens
caggatgtagttgagaggcgtgcgca

SEQ ID NO: 3065 - DNA, 26 bp, Homo sapiens
aggatgtagttgagaggcgtgcgcag

SEQ ID NO: 3066 - DNA, 26 bp, Homo sapiens
ggatgtagttgagaggcgtgcgcagc

SEQ ID NO: 3067 - DNA, 26 bp, Homo sapiens
gatgtagttgagaggcgtgcgcagct

SEQ ID NO: 3068 - DNA, 26 bp, Homo sapiens
atgtagttgagaggcgtgcgcagctt

SEQ ID NO: 3069 - DNA, 26 bp, Homo sapiens
tgtagttgagaggcgtgcgcagcttc

SEQ ID NO: 3070 - DNA, 26 bp, Homo sapiens
gtagttgagaggcgtgcgcagcttct

SEQ ID NO: 3071 - DNA, 26 bp, Homo sapiens
tagttgagaggcgtgcgcagcttctt

SEQ ID NO: 3072 - DNA, 26 bp, Homo sapiens
agttgagaggcgtgcgcagcttcttg

SEQ ID NO: 3073 - DNA, 26 bp, Homo sapiens
gttgagaggcgtgcgcagcttcttgt

SEQ ID NO: 3074 - DNA, 26 bp, Homo sapiens
ttgagaggcgtgcgcagcttcttgtg

SEQ ID NO: 3075 - DNA, 26 bp, Homo sapiens
tgagaggcgtgcgcagcttcttgtgc

SEQ ID NO: 3076 - DNA, 26 bp, Homo sapiens
gagaggcgtgcgcagcttcttgtgct

SEQ ID NO: 3077 - DNA, 26 bp, Homo sapiens
agaggcgtgcgcagcttcttgtgctg

SEQ ID NO: 3078 - DNA, 26 bp, Homo sapiens
gaggcgtgcgcagcttcttgtgctgg

SEQ ID NO: 3079 - DNA, 26 bp, Homo sapiens
aggcgtgcgcagcttcttgtgctgga

SEQ ID NO: 3080 - DNA, 26 bp, Homo sapiens
ggcgtgcgcagcttcttgtgctggac

SEQ ID NO: 3081 - DNA, 26 bp, Homo sapiens
gcgtgcgcagcttcttgtgctggacg

SEQ ID NO: 3082 - DNA, 26 bp, Homo sapiens
cgtgcgcagcttcttgtgctggacgg

SEQ ID NO: 3083 - DNA, 26 bp, Homo sapiens
gtgcgcagcttcttgtgctggacggt

SEQ ID NO: 3084 - DNA, 26 bp, Homo sapiens
tgcgcagcttcttgtgctggacggtg

SEQ ID NO: 3085 - DNA, 26 bp, Homo sapiens
gcgcagcttcttgtgctggacggtga

SEQ ID NO: 3086 - DNA, 26 bp, Homo sapiens
cgcagcttcttgtgctggacggtgac

SEQ ID NO: 3087 - DNA, 26 bp, Homo sapiens
gcagcttcttgtgctggacggtgacg

SEQ ID NO: 3088 - DNA, 26 bp, Homo sapiens
cagcttcttgtgctggacggtgacgt

SEQ ID NO: 3089 - DNA, 26 bp, Homo sapiens
agcttcttgtgctggacggtgacgta

SEQ ID NO: 3090 - DNA, 26 bp, Homo sapiens
gcttcttgtgctggacggtgacgtag

SEQ ID NO: 3091 - DNA, 26 bp, Homo sapiens
cttcttgtgctggacggtgacgtaga

SEQ ID NO: 3092 - DNA, 26 bp, Homo sapiens
ttcttgtgctggacggtgacgtagag

SEQ ID NO: 3093 - DNA, 26 bp, Homo sapiens
tcttgtgctggacggtgacgtagagc

SEQ ID NO: 3094 - DNA, 26 bp, Homo sapiens
cttgtgctggacggtgacgtagagcg

SEQ ID NO: 3095 - DNA, 26 bp, Homo sapiens
ttgtgctggacggtgacgtagagcgt

SEQ ID NO: 3096 - DNA, 26 bp, Homo sapiens
tgtgctggacggtgacgtagagcgtg

SEQ ID NO: 3097 - DNA, 26 bp, Homo sapiens
gtgctggacggtgacgtagagcgtga

SEQ ID NO: 3098 - DNA, 26 bp, Homo sapiens
tgctggacggtgacgtagagcgtgag

SEQ ID NO: 3099 - DNA, 26 bp, Homo sapiens
gctggacggtgacgtagagcgtgagg

SEQ ID NO: 3100 - DNA, 26 bp, Homo sapiens
ctggacggtgacgtagagcgtgagga

SEQ ID NO: 3101 - DNA, 26 bp, Homo sapiens
tggacggtgacgtagagcgtgaggaa

SEQ ID NO: 3102 - DNA, 26 bp, Homo sapiens
ggacggtgacgtagagcgtgaggaag

SEQ ID NO: 3103 - DNA, 26 bp, Homo sapiens
gacggtgacgtagagcgtgaggaagt

SEQ ID NO: 3104 - DNA, 26 bp, Homo sapiens
acggtgacgtagagcgtgaggaagtt

SEQ ID NO: 3105 - DNA, 26 bp, Homo sapiens
cggtgacgtagagcgtgaggaagttg

SEQ ID NO: 3106 - DNA, 26 bp, Homo sapiens
ggtgacgtagagcgtgaggaagttga

SEQ ID NO: 3107 - DNA, 26 bp, Homo sapiens
gtgacgtagagcgtgaggaagttgat

SEQ ID NO: 3108 - DNA, 26 bp, Homo sapiens
tgacgtagagcgtgaggaagttgatg

SEQ ID NO: 3109 - DNA, 26 bp, Homo sapiens
gacgtagagcgtgaggaagttgatgg

SEQ ID NO: 3110 - DNA, 26 bp, Homo sapiens
acgtagagcgtgaggaagttgatggg

SEQ ID NO: 3111 - DNA, 26 bp, Homo sapiens
cgtagagcgtgaggaagttgatgggg

SEQ ID NO: 3112 - DNA, 26 bp, Homo sapiens
gtagagcgtgaggaagttgatgggga

SEQ ID NO: 3113 - DNA, 26 bp, Homo sapiens
tagagcgtgaggaagttgatggggaa

SEQ ID NO: 3114 - DNA, 26 bp, Homo sapiens
agagcgtgaggaagttgatggggaag

SEQ ID NO: 3115 - DNA, 26 bp, Homo sapiens
gagcgtgaggaagttgatggggaagc

SEQ ID NO: 3116 - DNA, 26 bp, Homo sapiens
agcgtgaggaagttgatggggaagcc

SEQ ID NO: 3117 - DNA, 26 bp, Homo sapiens
gcgtgaggaagttgatggggaagccc

SEQ ID NO: 3118 - DNA, 26 bp, Homo sapiens
cgtgaggaagttgatggggaagccca

SEQ ID NO: 3119 - DNA, 26 bp, Homo sapiens
gtgaggaagttgatggggaagcccag

SEQ ID NO: 3120 - DNA, 26 bp, Homo sapiens
tgaggaagttgatggggaagcccagc

SEQ ID NO: 3121 - DNA, 26 bp, Homo sapiens
gaggaagttgatggggaagcccagca

SEQ ID NO: 3122 - DNA, 26 bp, Homo sapiens
aggaagttgatggggaagcccagcac

SEQ ID NO: 3123 - DNA, 26 bp, Homo sapiens
ggaagttgatggggaagcccagcacg

SEQ ID NO: 3124 - DNA, 26 bp, Homo sapiens
gaagttgatggggaagcccagcacga

SEQ ID NO: 3125 - DNA, 26 bp, Homo sapiens
aagttgatggggaagcccagcacgat

SEQ ID NO: 3126 - DNA, 26 bp, Homo sapiens
agttgatggggaagcccagcacgatc

SEQ ID NO: 3127 - DNA, 26 bp, Homo sapiens
gttgatggggaagcccagcacgatca

SEQ ID NO: 3128 - DNA, 26 bp, Homo sapiens
ttgatggggaagcccagcacgatcag

SEQ ID NO: 3129 - DNA, 26 bp, Homo sapiens
tgatggggaagcccagcacgatcagc

SEQ ID NO: 3130 - DNA, 26 bp, Homo sapiens
gatggggaagcccagcacgatcagca

SEQ ID NO: 3131 - DNA, 26 bp, Homo sapiens
atggggaagcccagcacgatcagcag

SEQ ID NO: 3132 - DNA, 26 bp, Homo sapiens
tggggaagcccagcacgatcagcaga

SEQ ID NO: 3133 - DNA, 26 bp, Homo sapiens
ggggaagcccagcacgatcagcagaa

SEQ ID NO: 3134 - DNA, 26 bp, Homo sapiens
gggaagcccagcacgatcagcagaaa

SEQ ID NO: 3135 - DNA, 26 bp, Homo sapiens
ggaagcccagcacgatcagcagaaac

SEQ ID NO: 3136 - DNA, 26 bp, Homo sapiens
gaagcccagcacgatcagcagaaaca

SEQ ID NO: 3137 - DNA, 26 bp, Homo sapiens
aagcccagcacgatcagcagaaacat

SEQ ID NO: 3138 - DNA, 26 bp, Homo sapiens
agcccagcacgatcagcagaaacatg

SEQ ID NO: 3139 - DNA, 26 bp, Homo sapiens
gcccagcacgatcagcagaaacatgt

SEQ ID NO: 3140 - DNA, 26 bp, Homo sapiens
cccagcacgatcagcagaaacatgta

SEQ ID NO: 3141 - DNA, 26 bp, Homo sapiens
ccagcacgatcagcagaaacatgtag

SEQ ID NO: 3142 - DNA, 26 bp, Homo sapiens
cagcacgatcagcagaaacatgtagg

SEQ ID NO: 3143 - DNA, 26 bp, Homo sapiens
agcacgatcagcagaaacatgtaggc

SEQ ID NO: 3144 - DNA, 26 bp, Homo sapiens
gcacgatcagcagaaacatgtaggcg

SEQ ID NO: 3145 - DNA, 26 bp, Homo sapiens
cacgatcagcagaaacatgtaggcgg

SEQ ID NO: 3146 - DNA, 26 bp, Homo sapiens
acgatcagcagaaacatgtaggcggc

SEQ ID NO: 3147 - DNA, 26 bp, Homo sapiens
cgatcagcagaaacatgtaggcggcc

SEQ ID NO: 3148 - DNA, 26 bp, Homo sapiens
gatcagcagaaacatgtaggcggcca

SEQ ID NO: 3149 - DNA, 26 bp, Homo sapiens
atcagcagaaacatgtaggcggccag

SEQ ID NO: 3150 - DNA, 26 bp, Homo sapiens
tcagcagaaacatgtaggcggccagc

SEQ ID NO: 3151 - DNA, 26 bp, Homo sapiens
cagcagaaacatgtaggcggccagca

SEQ ID NO: 3152 - DNA, 26 bp, Homo sapiens
agcagaaacatgtaggcggccagcat

SEQ ID NO: 3153 - DNA, 26 bp, Homo sapiens
gcagaaacatgtaggcggccagcatg

SEQ ID NO: 3154 - DNA, 26 bp, Homo sapiens
cagaaacatgtaggcggccagcatgg

SEQ ID NO: 3155 - DNA, 26 bp, Homo sapiens
agaaacatgtaggcggccagcatgga

SEQ ID NO: 3156 - DNA, 26 bp, Homo sapiens
gaaacatgtaggcggccagcatggag

SEQ ID NO: 3157 - DNA, 26 bp, Homo sapiens
aaacatgtaggcggccagcatggaga

SEQ ID NO: 3158 - DNA, 26 bp, Homo sapiens
aacatgtaggcggccagcatggagaa

SEQ ID NO: 3159 - DNA, 26 bp, Homo sapiens
acatgtaggcggccagcatggagaac

SEQ ID NO: 3160 - DNA, 26 bp, Homo sapiens
catgtaggcggccagcatggagaact

SEQ ID NO: 3161 - DNA, 26 bp, Homo sapiens
atgtaggcggccagcatggagaactg

SEQ ID NO: 3162 - DNA, 26 bp, Homo sapiens
tgtaggcggccagcatggagaactgc

SEQ ID NO: 3163 - DNA, 26 bp, Homo sapiens
gtaggcggccagcatggagaactgcc

SEQ ID NO: 3164 - DNA, 26 bp, Homo sapiens
taggcggccagcatggagaactgcca

SEQ ID NO: 3165 - DNA, 26 bp, Homo sapiens
aggcggccagcatggagaactgccat

SEQ ID NO: 3166 - DNA, 26 bp, Homo sapiens
ggcggccagcatggagaactgccatg

SEQ ID NO: 3167 - DNA, 26 bp, Homo sapiens
gcggccagcatggagaactgccatgg

SEQ ID NO: 3168 - DNA, 26 bp, Homo sapiens
cggccagcatggagaactgccatggc

SEQ ID NO: 3169 - DNA, 26 bp, Homo sapiens
ggccagcatggagaactgccatggct

SEQ ID NO: 3170 - DNA, 26 bp, Homo sapiens
gccagcatggagaactgccatggctc

SEQ ID NO: 3171 - DNA, 26 bp, Homo sapiens
ccagcatggagaactgccatggctca

SEQ ID NO: 3172 - DNA, 26 bp, Homo sapiens
cagcatggagaactgccatggctcag

SEQ ID NO: 3173 - DNA, 26 bp, Homo sapiens
agcatggagaactgccatggctcagc

SEQ ID NO: 3174 - DNA, 26 bp, Homo sapiens
gcatggagaactgccatggctcagcc

SEQ ID NO: 3175 - DNA, 26 bp, Homo sapiens
catggagaactgccatggctcagcca

SEQ ID NO: 3176 - DNA, 26 bp, Homo sapiens
atggagaactgccatggctcagccag

SEQ ID NO: 3177 - DNA, 26 bp, Homo sapiens
tggagaactgccatggctcagccagg

SEQ ID NO: 3178 - DNA, 26 bp, Homo sapiens
ggagaactgccatggctcagccaggt

SEQ ID NO: 3179 - DNA, 26 bp, Homo sapiens
gagaactgccatggctcagccaggta

SEQ ID NO: 3180 - DNA, 26 bp, Homo sapiens
agaactgccatggctcagccaggtag

SEQ ID NO: 3181 - DNA, 26 bp, Homo sapiens
gaactgccatggctcagccaggtagt

SEQ ID NO: 3182 - DNA, 26 bp, Homo sapiens
aactgccatggctcagccaggtagta

SEQ ID NO: 3183 - DNA, 26 bp, Homo sapiens
actgccatggctcagccaggtagtac

SEQ ID NO: 3184 - DNA, 26 bp, Homo sapiens
ctgccatggctcagccaggtagtact

SEQ ID NO: 3185 - DNA, 26 bp, Homo sapiens
tgccatggctcagccaggtagtactg

SEQ ID NO: 3186 - DNA, 26 bp, Homo sapiens
gccatggctcagccaggtagtactgt

SEQ ID NO: 3187 - DNA, 26 bp, Homo sapiens
ccatggctcagccaggtagtactgtg

SEQ ID NO: 3188 - DNA, 26 bp, Homo sapiens
catggctcagccaggtagtactgtgg

SEQ ID NO: 3189 - DNA, 26 bp, Homo sapiens
atggctcagccaggtagtactgtggg

SEQ ID NO: 3190 - DNA, 26 bp, Homo sapiens
tggctcagccaggtagtactgtgggt

SEQ ID NO: 3191 - DNA, 26 bp, Homo sapiens
ggctcagccaggtagtactgtgggta

SEQ ID NO: 3192 - DNA, 26 bp, Homo sapiens
gctcagccaggtagtactgtgggtac

SEQ ID NO: 3193 - DNA, 26 bp, Homo sapiens
ctcagccaggtagtactgtgggtact

SEQ ID NO: 3194 - DNA, 26 bp, Homo sapiens
tcagccaggtagtactgtgggtactc

SEQ ID NO: 3195 - DNA, 26 bp, Homo sapiens
cagccaggtagtactgtgggtactcg

SEQ ID NO: 3196 - DNA, 26 bp, Homo sapiens
agccaggtagtactgtgggtactcga

SEQ ID NO: 3197 - DNA, 26 bp, Homo sapiens
gccaggtagtactgtgggtactcgaa

SEQ ID NO: 3198 - DNA, 26 bp, Homo sapiens
ccaggtagtactgtgggtactcgaag

SEQ ID NO: 3199 - DNA, 26 bp, Homo sapiens
caggtagtactgtgggtactcgaagg

SEQ ID NO: 3200 - DNA, 26 bp, Homo sapiens
aggtagtactgtgggtactcgaaggg

SEQ ID NO: 3201 - DNA, 26 bp, Homo sapiens
ggtagtactgtgggtactcgaagggg

SEQ ID NO: 3202 - DNA, 26 bp, Homo sapiens
gtagtactgtgggtactcgaaggggc

SEQ ID NO: 3203 - DNA, 26 bp, Homo sapiens
tagtactgtgggtactcgaaggggct

SEQ ID NO: 3204 - DNA, 26 bp, Homo sapiens
agtactgtgggtactcgaaggggctg

SEQ ID NO: 3205 - DNA, 26 bp, Homo sapiens
gtactgtgggtactcgaaggggctgc

SEQ ID NO: 3206 - DNA, 26 bp, Homo sapiens
tactgtgggtactcgaaggggctgcg

SEQ ID NO: 3207 - DNA, 26 bp, Homo sapiens
actgtgggtactcgaaggggctgcgt

SEQ ID NO: 3208 - DNA, 26 bp, Homo sapiens
ctgtgggtactcgaaggggctgcgta

SEQ ID NO: 3209 - DNA, 26 bp, Homo sapiens
tgtgggtactcgaaggggctgcgtac

SEQ ID NO: 3210 - DNA, 26 bp, Homo sapiens
gtgggtactcgaaggggctgcgtacc

SEQ ID NO: 3211 - DNA, 26 bp, Homo sapiens
tgggtactcgaaggggctgcgtacca

SEQ ID NO: 3212 - DNA, 26 bp, Homo sapiens
gggtactcgaaggggctgcgtaccac

SEQ ID NO: 3213 - DNA, 26 bp, Homo sapiens
ggtactcgaaggggctgcgtaccaca

SEQ ID NO: 3214 - DNA, 26 bp, Homo sapiens
gtactcgaaggggctgcgtaccacac

SEQ ID NO: 3215 - DNA, 26 bp, Homo sapiens
tactcgaaggggctgcgtaccacacc

SEQ ID NO: 3216 - DNA, 26 bp, Homo sapiens
actcgaaggggctgcgtaccacaccc

SEQ ID NO: 3217 - DNA, 26 bp, Homo sapiens
ctcgaaggggctgcgtaccacacccg

SEQ ID NO: 3218 - DNA, 26 bp, Homo sapiens
tcgaaggggctgcgtaccacacccgt

SEQ ID NO: 3219 - DNA, 26 bp, Homo sapiens
cgaaggggctgcgtaccacacccgtc

SEQ ID NO: 3220 - DNA, 26 bp, Homo sapiens
gaaggggctgcgtaccacacccgtcg

SEQ ID NO: 3221 - DNA, 26 bp, Homo sapiens
aaggggctgcgtaccacacccgtcgc

SEQ ID NO: 3222 - DNA, 26 bp, Homo sapiens
aggggctgcgtaccacacccgtcgca

SEQ ID NO: 3223 - DNA, 26 bp, Homo sapiens
ggggctgcgtaccacacccgtcgcat

SEQ ID NO: 3224 - DNA, 26 bp, Homo sapiens
gggctgcgtaccacacccgtcgcatt

SEQ ID NO: 3225 - DNA, 26 bp, Homo sapiens
ggctgcgtaccacacccgtcgcattg

SEQ ID NO: 3226 - DNA, 26 bp, Homo sapiens
gctgcgtaccacacccgtcgcattgg

SEQ ID NO: 3227 - DNA, 26 bp, Homo sapiens
ctgcgtaccacacccgtcgcattgga

SEQ ID NO: 3228 - DNA, 26 bp, Homo sapiens
tgcgtaccacacccgtcgcattggag

SEQ ID NO: 3229 - DNA, 26 bp, Homo sapiens
gcgtaccacacccgtcgcattggaga

SEQ ID NO: 3230 - DNA, 26 bp, Homo sapiens
cgtaccacacccgtcgcattggagaa

SEQ ID NO: 3231 - DNA, 26 bp, Homo sapiens
gtaccacacccgtcgcattggagaag

SEQ ID NO: 3232 - DNA, 26 bp, Homo sapiens
taccacacccgtcgcattggagaagg

SEQ ID NO: 3233 - DNA, 26 bp, Homo sapiens
accacacccgtcgcattggagaaggg

SEQ ID NO: 3234 - DNA, 26 bp, Homo sapiens
ccacacccgtcgcattggagaagggc

SEQ ID NO: 3235 - DNA, 26 bp, Homo sapiens
cacacccgtcgcattggagaagggca

SEQ ID NO: 3236 - DNA, 26 bp, Homo sapiens
acacccgtcgcattggagaagggcac

SEQ ID NO: 3237 - DNA, 26 bp, Homo sapiens
cacccgtcgcattggagaagggcacg

SEQ ID NO: 3238 - DNA, 26 bp, Homo sapiens
acccgtcgcattggagaagggcacgt

SEQ ID NO: 3239 - DNA, 26 bp, Homo sapiens
cccgtcgcattggagaagggcacgta

SEQ ID NO: 3240 - DNA, 26 bp, Homo sapiens
ccgtcgcattggagaagggcacgtag

SEQ ID NO: 3241 - DNA, 26 bp, Homo sapiens
cgtcgcattggagaagggcacgtaga

SEQ ID NO: 3242 - DNA, 26 bp, Homo sapiens
gtcgcattggagaagggcacgtagaa

SEQ ID NO: 3243 - DNA, 26 bp, Homo sapiens
tcgcattggagaagggcacgtagaag

SEQ ID NO: 3244 - DNA, 26 bp, Homo sapiens
cgcattggagaagggcacgtagaagt

SEQ ID NO: 3245 - DNA, 26 bp, Homo sapiens
gcattggagaagggcacgtagaagtt

SEQ ID NO: 3246 - DNA, 26 bp, Homo sapiens
cattggagaagggcacgtagaagtta

SEQ ID NO: 3247 - DNA, 26 bp, Homo sapiens
attggagaagggcacgtagaagttag

SEQ ID NO: 3248 - DNA, 26 bp, Homo sapiens
ttggagaagggcacgtagaagttagg

SEQ ID NO: 3249 - DNA, 26 bp, Homo sapiens
tggagaagggcacgtagaagttaggg

SEQ ID NO: 3250 - DNA, 26 bp, Homo sapiens
ggagaagggcacgtagaagttagggc

SEQ ID NO: 3251 - DNA, 26 bp, Homo sapiens
gagaagggcacgtagaagttagggcc

SEQ ID NO: 3252 - DNA, 26 bp, Homo sapiens
agaagggcacgtagaagttagggcct

SEQ ID NO: 3253 - DNA, 26 bp, Homo sapiens
gaagggcacgtagaagttagggcctt

SEQ ID NO: 3254 - DNA, 26 bp, Homo sapiens
aagggcacgtagaagttagggccttc

SEQ ID NO: 3255 - DNA, 26 bp, Homo sapiens
agggcacgtagaagttagggccttct

SEQ ID NO: 3256 - DNA, 26 bp, Homo sapiens
gggcacgtagaagttagggccttctg

SEQ ID NO: 3257 - DNA, 26 bp, Homo sapiens
ggcacgtagaagttagggccttctgt

SEQ ID NO: 3258 - DNA, 26 bp, Homo sapiens
gcacgtagaagttagggccttctgtg

SEQ ID NO: 3259 - DNA, 26 bp, Homo sapiens
cacgtagaagttagggccttctgtgc

SEQ ID NO: 3260 - DNA, 26 bp, Homo sapiens
acgtagaagttagggccttctgtgcc

SEQ ID NO: 3261 - DNA, 26 bp, Homo sapiens
cgtagaagttagggccttctgtgcca

SEQ ID NO: 3262 - DNA, 26 bp, Homo sapiens
gtagaagttagggccttctgtgccat

SEQ ID NO: 3263 - DNA, 26 bp, Homo sapiens
tagaagttagggccttctgtgccatt

SEQ ID NO: 3264 - DNA, 26 bp, Homo sapiens
agaagttagggccttctgtgccattc

SEQ ID NO: 3265 - DNA, 26 bp, Homo sapiens
gaagttagggccttctgtgccattca

SEQ ID NO: 3266 - DNA, 26 bp, Homo sapiens
aagttagggccttctgtgccattcat

SEQ ID NO: 3267 - DNA, 26 bp, Homo sapiens
agttagggccttctgtgccattcatg

SEQ ID NO: 3268 - DNA, 26 bp, Homo sapiens
gttagggccttctgtgccattcatgg

SEQ ID NO: 3269 - DNA, 26 bp, Homo sapiens
ttagggccttctgtgccattcatggc

SEQ ID NO: 3270 - DNA, 26 bp, Homo sapiens
tagggccttctgtgccattcatggct

SEQ ID NO: 3271 - DNA, 26 bp, Homo sapiens
agggccttctgtgccattcatggctg

SEQ ID NO: 3272 - DNA, 26 bp, Homo sapiens
gggccttctgtgccattcatggctgt

SEQ ID NO: 3273 - DNA, 26 bp, Homo sapiens
ggccttctgtgccattcatggctgtg

SEQ ID NO: 3274 - DNA, 26 bp, Homo sapiens
gccttctgtgccattcatggctgtgg

SEQ ID NO: 3275 - DNA, 26 bp, Homo sapiens
ccttctgtgccattcatggctgtggc

SEQ ID NO: 3276 - DNA, 26 bp, Homo sapiens
cttctgtgccattcatggctgtggcc

SEQ ID NO: 3277 - DNA, 26 bp, Homo sapiens
ttctgtgccattcatggctgtggccc

SEQ ID NO: 3278 - DNA, 26 bp, Homo sapiens
tctgtgccattcatggctgtggccct

SEQ ID NO: 3279 - DNA, 26 bp, Homo sapiens
ctgtgccattcatggctgtggccctt

SEQ ID NO: 3280 - DNA, 26 bp, Homo sapiens
tgtgccattcatggctgtggcccttg

SEQ ID NO: 3281 - DNA, 26 bp, Homo sapiens
gtgccattcatggctgtggcccttgt

SEQ ID NO: 3282 - DNA, 26 bp, Homo sapiens
tgccattcatggctgtggcccttgtg

SEQ ID NO: 3283 - DNA, 26 bp, Homo sapiens
gccattcatggctgtggcccttgtgg

SEQ ID NO: 3284 - DNA, 26 bp, Homo sapiens
ccattcatggctgtggcccttgtggc

SEQ ID NO: 3285 - DNA, 26 bp, Homo sapiens
cattcatggctgtggcccttgtggct

SEQ ID NO: 3286 - DNA, 26 bp, Homo sapiens
attcatggctgtggcccttgtggctg

SEQ ID NO: 3287 - DNA, 26 bp, Homo sapiens
ttcatggctgtggcccttgtggctga

SEQ ID NO: 3288 - DNA, 26 bp, Homo sapiens
tcatggctgtggcccttgtggctgac

SEQ ID NO: 3289 - DNA, 26 bp, Homo sapiens
catggctgtggcccttgtggctgacc

SEQ ID NO: 3290 - DNA, 26 bp, Homo sapiens
atggctgtggcccttgtggctgaccc

SEQ ID NO: 3291 - DNA, 26 bp, Homo sapiens
tggctgtggcccttgtggctgacccg

SEQ ID NO: 3292 - DNA, 26 bp, Homo sapiens
ggctgtggcccttgtggctgacccgt

SEQ ID NO: 3293 - DNA, 26 bp, Homo sapiens
gctgtggcccttgtggctgacccgtg

SEQ ID NO: 3294 - DNA, 26 bp, Homo sapiens
ctgtggcccttgtggctgacccgtgg

SEQ ID NO: 3295 - DNA, 26 bp, Homo sapiens
tgtggcccttgtggctgacccgtggc

SEQ ID NO: 3296 - DNA, 26 bp, Homo sapiens
gtggcccttgtggctgacccgtggct

SEQ ID NO: 3297 - DNA, 26 bp, Homo sapiens
tggcccttgtggctgacccgtggctg

SEQ ID NO: 3298 - DNA, 26 bp, Homo sapiens
ggcccttgtggctgacccgtggctgc

SEQ ID NO: 3299 - DNA, 26 bp, Homo sapiens
gcccttgtggctgacccgtggctgct

SEQ ID NO: 3300 - DNA, 26 bp, Homo sapiens
cccttgtggctgacccgtggctgctc

SEQ ID NO: 3301 - DNA, 26 bp, Homo sapiens
ccttgtggctgacccgtggctgctcc

SEQ ID NO: 3302 - DNA, 26 bp, Homo sapiens
cttgtggctgacccgtggctgctccc

SEQ ID NO: 3303 - DNA, 26 bp, Homo sapiens
ttgtggctgacccgtggctgctccca

SEQ ID NO: 3304 - DNA, 26 bp, Homo sapiens
tgtggctgacccgtggctgctcccac

SEQ ID NO: 3305 - DNA, 26 bp, Homo sapiens
gtggctgacccgtggctgctcccacc

SEQ ID NO: 3306 - DNA, 26 bp, Homo sapiens
tggctgacccgtggctgctcccaccc

SEQ ID NO: 3307 - DNA, 26 bp, Homo sapiens
ggctgacccgtggctgctcccaccca

SEQ ID NO: 3308 - DNA, 26 bp, Homo sapiens
gctgacccgtggctgctcccacccaa

SEQ ID NO: 3309 - DNA, 26 bp, Homo sapiens
ctgacccgtggctgctcccacccaag

SEQ ID NO: 3310 - DNA, 26 bp, Homo sapiens
tgacccgtggctgctcccacccaaga

SEQ ID NO: 3311 - DNA, 26 bp, Homo sapiens
gacccgtggctgctcccacccaagaa

SEQ ID NO: 3312 - DNA, 26 bp, Homo sapiens
acccgtggctgctcccacccaagaat

SEQ ID NO: 3313 - DNA, 26 bp, Homo sapiens
cccgtggctgctcccacccaagaatg

SEQ ID NO: 3314 - DNA, 26 bp, Homo sapiens
ccgtggctgctcccacccaagaatgc

SEQ ID NO: 3315 - DNA, 26 bp, Homo sapiens
cgtggctgctcccacccaagaatgct

SEQ ID NO: 3316 - DNA, 26 bp, Homo sapiens
gtggctgctcccacccaagaatgctg

SEQ ID NO: 3317 - DNA, 26 bp, Homo sapiens
tggctgctcccacccaagaatgctgc

SEQ ID NO: 3318 - DNA, 26 bp, Homo sapiens
ggctgctcccacccaagaatgctgcg

SEQ ID NO: 3319 - DNA, 26 bp, Homo sapiens
gctgctcccacccaagaatgctgcga

SEQ ID NO: 3320 - DNA, 26 bp, Homo sapiens
ctgctcccacccaagaatgctgcgaa

SEQ ID NO: 3321 - DNA, 26 bp, Homo sapiens
tgctcccacccaagaatgctgcgaag

SEQ ID NO: 3322 - DNA, 26 bp, Homo sapiens
gctcccacccaagaatgctgcgaagg

SEQ ID NO: 3323 - DNA, 26 bp, Homo sapiens
ctcccacccaagaatgctgcgaaggc

SEQ ID NO: 3324 - DNA, 26 bp, Homo sapiens
tcccacccaagaatgctgcgaaggcc

SEQ ID NO: 3325 - DNA, 26 bp, Homo sapiens
cccacccaagaatgctgcgaaggcct

SEQ ID NO: 3326 - DNA, 26 bp, Homo sapiens
ccacccaagaatgctgcgaaggcctg

SEQ ID NO: 3327 - DNA, 26 bp, Homo sapiens
cacccaagaatgctgcgaaggcctga

SEQ ID NO: 3328 - DNA, 26 bp, Homo sapiens
acccaagaatgctgcgaaggcctgag

SEQ ID NO: 3329 - DNA, 26 bp, Homo sapiens
cccaagaatgctgcgaaggcctgagc

SEQ ID NO: 3330 - DNA, 26 bp, Homo sapiens
ccaagaatgctgcgaaggcctgagct

SEQ ID NO: 3331 - DNA, 26 bp, Homo sapiens
caagaatgctgcgaaggcctgagctc

SEQ ID NO: 3332 - DNA, 26 bp, Homo sapiens
aagaatgctgcgaaggcctgagctca

SEQ ID NO: 3333 - DNA, 26 bp, Homo sapiens
agaatgctgcgaaggcctgagctcag

SEQ ID NO: 3334 - DNA, 26 bp, Homo sapiens
gaatgctgcgaaggcctgagctcagc

SEQ ID NO: 3335 - DNA, 26 bp, Homo sapiens
aatgctgcgaaggcctgagctcagcc

SEQ ID NO: 3336 - DNA, 26 bp, Homo sapiens
atgctgcgaaggcctgagctcagcca

SEQ ID NO: 3337 - DNA, 26 bp, Homo sapiens
tgctgcgaaggcctgagctcagccac

SEQ ID NO: 3338 - DNA, 26 bp, Homo sapiens
gctgcgaaggcctgagctcagccact

SEQ ID NO: 3339 - DNA, 26 bp, Homo sapiens
ctgcgaaggcctgagctcagccactc

SEQ ID NO: 3340 - DNA, 26 bp, Homo sapiens
tgcgaaggcctgagctcagccactca

SEQ ID NO: 3341 - DNA, 26 bp, Homo sapiens
gcgaaggcctgagctcagccactcag

SEQ ID NO: 3342 - DNA, 26 bp, Homo sapiens
cgaaggcctgagctcagccactcagg

SEQ ID NO: 3343 - DNA, 26 bp, Homo sapiens
gaaggcctgagctcagccactcaggg

SEQ ID NO: 3344 - DNA, 26 bp, Homo sapiens
aaggcctgagctcagccactcagggc

SEQ ID NO: 3345 - DNA, 26 bp, Homo sapiens
aggcctgagctcagccactcagggct

SEQ ID NO: 3346 - DNA, 26 bp, Homo sapiens
ggcctgagctcagccactcagggctc

SEQ ID NO: 3347 - DNA, 26 bp, Homo sapiens
gcctgagctcagccactcagggctcc

SEQ ID NO: 3348 - DNA, 26 bp, Homo sapiens
cctgagctcagccactcagggctcca

SEQ ID NO: 3349 - DNA, 26 bp, Homo sapiens
ctgagctcagccactcagggctccag

SEQ ID NO: 3350 - DNA, 26 bp, Homo sapiens
tgagctcagccactcagggctccagc

SEQ ID NO: 3351 - DNA, 26 bp, Homo sapiens
gagctcagccactcagggctccagct

SEQ ID NO: 3352 - DNA, 26 bp, Homo sapiens
agctcagccactcagggctccagctg

SEQ ID NO: 3353 - DNA, 26 bp, Homo sapiens
gctcagccactcagggctccagctgg

SEQ ID NO: 3354 - DNA, 26 bp, Homo sapiens
ctcagccactcagggctccagctgga

SEQ ID NO: 3355 - DNA, 26 bp, Homo sapiens
tcagccactcagggctccagctggat

SEQ ID NO: 3356 - DNA, 26 bp, Homo sapiens
cagccactcagggctccagctggatg

SEQ ID NO: 3357 - DNA, 26 bp, Homo sapiens
agccactcagggctccagctggatga

SEQ ID NO: 3358 - DNA, 26 bp, Homo sapiens
gccactcagggctccagctggatgac

SEQ ID NO: 3359 - DNA, 26 bp, Homo sapiens
ccactcagggctccagctggatgact

SEQ ID NO: 3360 - DNA, 26 bp, Homo sapiens
cactcagggctccagctggatgactc

SEQ ID NO: 3361 - DNA, 26 bp, Homo sapiens
actcagggctccagctggatgactct

SEQ ID NO: 3362 - DNA, 26 bp, Homo sapiens
ttttttttttttttttttagtttgaa

SEQ ID NO: 3363 - DNA, 26 bp, Homo sapiens
tttttttttttttttttagtttgaat

SEQ ID NO: 3364 - DNA, 26 bp, Homo sapiens
ttttttttttttttttagtttgaatt

SEQ ID NO: 3365 - DNA, 26 bp, Homo sapiens
tttttttttttttttagtttgaattt

SEQ ID NO: 3366 - DNA, 26 bp, Homo sapiens
ttttttttttttttagtttgaatttg

SEQ ID NO: 3367 - DNA, 26 bp, Homo sapiens
tttttttttttttagtttgaatttgg

SEQ ID NO: 3368 - DNA, 26 bp, Homo sapiens
ttttttttttttagtttgaatttgga

SEQ ID NO: 3369 - DNA, 26 bp, Homo sapiens
tttttttttttagtttgaatttggat

SEQ ID NO: 3370 - DNA, 26 bp, Homo sapiens
ttttttttttagtttgaatttggatt

SEQ ID NO: 3371 - DNA, 26 bp, Homo sapiens
tttttttttagtttgaatttggattc

SEQ ID NO: 3372 - DNA, 26 bp, Homo sapiens
ttttttttagtttgaatttggattct

SEQ ID NO: 3373 - DNA, 26 bp, Homo sapiens
tttttttagtttgaatttggattctt

SEQ ID NO: 3374 - DNA, 26 bp, Homo sapiens
ttttttagtttgaatttggattcttt

SEQ ID NO: 3375 - DNA, 26 bp, Homo sapiens
tttttagtttgaatttggattctttt

SEQ ID NO: 3376 - DNA, 26 bp, Homo sapiens
ttttagtttgaatttggattctttta

SEQ ID NO: 3377 - DNA, 26 bp, Homo sapiens
tttagtttgaatttggattcttttaa

SEQ ID NO: 3378 - DNA, 26 bp, Homo sapiens
ttagtttgaatttggattcttttaat

SEQ ID NO: 3379 - DNA, 26 bp, Homo sapiens
tagtttgaatttggattcttttaata

SEQ ID NO: 3380 - DNA, 26 bp, Homo sapiens
agtttgaatttggattcttttaatag

SEQ ID NO: 3381 - DNA, 26 bp, Homo sapiens
gtttgaatttggattcttttaatagc

SEQ ID NO: 3382 - DNA, 26 bp, Homo sapiens
tttgaatttggattcttttaatagcc

SEQ ID NO: 3383 - DNA, 26 bp, Homo sapiens
ttgaatttggattcttttaatagcct

SEQ ID NO: 3384 - DNA, 26 bp, Homo sapiens
tgaatttggattcttttaatagcctc

SEQ ID NO: 3385 - DNA, 26 bp, Homo sapiens
gaatttggattcttttaatagcctca

SEQ ID NO: 3386 - DNA, 26 bp, Homo sapiens
aatttggattcttttaatagcctcat

SEQ ID NO: 3387 - DNA, 26 bp, Homo sapiens
atttggattcttttaatagcctcata

SEQ ID NO: 3388 - DNA, 26 bp, Homo sapiens
tttggattcttttaatagcctcataa

SEQ ID NO: 3389 - DNA, 26 bp, Homo sapiens
ttggattcttttaatagcctcataat

SEQ ID NO: 3390 - DNA, 26 bp, Homo sapiens
tggattcttttaatagcctcataata

SEQ ID NO: 3391 - DNA, 26 bp, Homo sapiens
ggattcttttaatagcctcataataa

SEQ ID NO: 3392 - DNA, 26 bp, Homo sapiens
gattcttttaatagcctcataataag

SEQ ID NO: 3393 - DNA, 26 bp, Homo sapiens
attcttttaatagcctcataataagt

SEQ ID NO: 3394 - DNA, 26 bp, Homo sapiens
ttcttttaatagcctcataataagtg

SEQ ID NO: 3395 - DNA, 26 bp, Homo sapiens
tcttttaatagcctcataataagtgc

SEQ ID NO: 3396 - DNA, 26 bp, Homo sapiens
cttttaatagcctcataataagtgcc

SEQ ID NO: 3397 - DNA, 26 bp, Homo sapiens
ttttaatagcctcataataagtgcca

SEQ ID NO: 3398 - DNA, 26 bp, Homo sapiens
tttaatagcctcataataagtgccat

SEQ ID NO: 3399 - DNA, 26 bp, Homo sapiens
ttaatagcctcataataagtgccata

SEQ ID NO: 3400 - DNA, 26 bp, Homo sapiens
taatagcctcataataagtgccatac

SEQ ID NO: 3401 - DNA, 26 bp, Homo sapiens
aatagcctcataataagtgccataca

SEQ ID NO: 3402 - DNA, 26 bp, Homo sapiens
atagcctcataataagtgccatacag

SEQ ID NO: 3403 - DNA, 26 bp, Homo sapiens
tagcctcataataagtgccatacagg

SEQ ID NO: 3404 - DNA, 26 bp, Homo sapiens
agcctcataataagtgccatacaggg

SEQ ID NO: 3405 - DNA, 26 bp, Homo sapiens
gcctcataataagtgccatacagggt

SEQ ID NO: 3406 - DNA, 26 bp, Homo sapiens
cctcataataagtgccatacagggtt

SEQ ID NO: 3407 - DNA, 26 bp, Homo sapiens
ctcataataagtgccatacagggttt

SEQ ID NO: 3408 - DNA, 26 bp, Homo sapiens
tcataataagtgccatacagggtttt

SEQ ID NO: 3409 - DNA, 26 bp, Homo sapiens
cataataagtgccatacagggttttt

SEQ ID NO: 3410 - DNA, 26 bp, Homo sapiens
ataataagtgccatacagggttttta

SEQ ID NO: 3411 - DNA, 26 bp, Homo sapiens
taataagtgccatacagggtttttat

SEQ ID NO: 3412 - DNA, 26 bp, Homo sapiens
aataagtgccatacagggtttttatt

SEQ ID NO: 3413 - DNA, 26 bp, Homo sapiens
ataagtgccatacagggtttttattc

SEQ ID NO: 3414 - DNA, 26 bp, Homo sapiens
taagtgccatacagggtttttattca

SEQ ID NO: 3415 - DNA, 26 bp, Homo sapiens
aagtgccatacagggtttttattcac

SEQ ID NO: 3416 - DNA, 26 bp, Homo sapiens
agtgccatacagggtttttattcaca

SEQ ID NO: 3417 - DNA, 26 bp, Homo sapiens
gtgccatacagggtttttattcacag

SEQ ID NO: 3418 - DNA, 26 bp, Homo sapiens
tgccatacagggtttttattcacagg

SEQ ID NO: 3419 - DNA, 26 bp, Homo sapiens
gccatacagggtttttattcacaggc

SEQ ID NO: 3420 - DNA, 26 bp, Homo sapiens
ccatacagggtttttattcacaggct

SEQ ID NO: 3421 - DNA, 26 bp, Homo sapiens
catacagggtttttattcacaggctt

SEQ ID NO: 3422 - DNA, 26 bp, Homo sapiens
atacagggtttttattcacaggcttg

SEQ ID NO: 3423 - DNA, 26 bp, Homo sapiens
tacagggtttttattcacaggcttga

SEQ ID NO: 3424 - DNA, 26 bp, Homo sapiens
acagggtttttattcacaggcttgaa

SEQ ID NO: 3425 - DNA, 26 bp, Homo sapiens
cagggtttttattcacaggcttgaat

SEQ ID NO: 3426 - DNA, 26 bp, Homo sapiens
agggtttttattcacaggcttgaatg

SEQ ID NO: 3427 - DNA, 26 bp, Homo sapiens
gggtttttattcacaggcttgaatga

SEQ ID NO: 3428 - DNA, 26 bp, Homo sapiens
ggtttttattcacaggcttgaatgac

SEQ ID NO: 3429 - DNA, 26 bp, Homo sapiens
gtttttattcacaggcttgaatgaca

SEQ ID NO: 3430 - DNA, 26 bp, Homo sapiens
tttttattcacaggcttgaatgacaa

SEQ ID NO: 3431 - DNA, 26 bp, Homo sapiens
ttttattcacaggcttgaatgacaaa

SEQ ID NO: 3432 - DNA, 26 bp, Homo sapiens
tttattcacaggcttgaatgacaaag

SEQ ID NO: 3433 - DNA, 26 bp, Homo sapiens
ttattcacaggcttgaatgacaaaga

SEQ ID NO: 3434 - DNA, 26 bp, Homo sapiens
tattcacaggcttgaatgacaaagaa

SEQ ID NO: 3435 - DNA, 26 bp, Homo sapiens
attcacaggcttgaatgacaaagaaa

SEQ ID NO: 3436 - DNA, 26 bp, Homo sapiens
ttcacaggcttgaatgacaaagaaat

SEQ ID NO: 3437 - DNA, 26 bp, Homo sapiens
tcacaggcttgaatgacaaagaaatt

SEQ ID NO: 3438 - DNA, 26 bp, Homo sapiens
cacaggcttgaatgacaaagaaattc

SEQ ID NO: 3439 - DNA, 26 bp, Homo sapiens
acaggcttgaatgacaaagaaattct

SEQ ID NO: 3440 - DNA, 26 bp, Homo sapiens
caggcttgaatgacaaagaaattctg

SEQ ID NO: 3441 - DNA, 26 bp, Homo sapiens
aggcttgaatgacaaagaaattctga

SEQ ID NO: 3442 - DNA, 26 bp, Homo sapiens
ggcttgaatgacaaagaaattctgac

SEQ ID NO: 3443 - DNA, 26 bp, Homo sapiens
gcttgaatgacaaagaaattctgaca

SEQ ID NO: 3444 - DNA, 26 bp, Homo sapiens
cttgaatgacaaagaaattctgacaa

SEQ ID NO: 3445 - DNA, 26 bp, Homo sapiens
ttgaatgacaaagaaattctgacaag

SEQ ID NO: 3446 - DNA, 26 bp, Homo sapiens
tgaatgacaaagaaattctgacaagt

SEQ ID NO: 3447 - DNA, 26 bp, Homo sapiens
gaatgacaaagaaattctgacaagtt

SEQ ID NO: 3448 - DNA, 26 bp, Homo sapiens
aatgacaaagaaattctgacaagttt

SEQ ID NO: 3449 - DNA, 26 bp, Homo sapiens
atgacaaagaaattctgacaagttta

SEQ ID NO: 3450 - DNA, 26 bp, Homo sapiens
tgacaaagaaattctgacaagtttaa

SEQ ID NO: 3451 - DNA, 26 bp, Homo sapiens
gacaaagaaattctgacaagtttaat

SEQ ID NO: 3452 - DNA, 26 bp, Homo sapiens
acaaagaaattctgacaagtttaata

SEQ ID NO: 3453 - DNA, 26 bp, Homo sapiens
caaagaaattctgacaagtttaatac

SEQ ID NO: 3454 - DNA, 26 bp, Homo sapiens
aaagaaattctgacaagtttaatacc

SEQ ID NO: 3455 - DNA, 26 bp, Homo sapiens
aagaaattctgacaagtttaataccc

SEQ ID NO: 3456 - DNA, 26 bp, Homo sapiens
agaaattctgacaagtttaataccca

SEQ ID NO: 3457 - DNA, 26 bp, Homo sapiens
gaaattctgacaagtttaatacccat

SEQ ID NO: 3458 - DNA, 26 bp, Homo sapiens
aaattctgacaagtttaatacccatc

SEQ ID NO: 3459 - DNA, 26 bp, Homo sapiens
aattctgacaagtttaatacccatct

SEQ ID NO: 3460 - DNA, 26 bp, Homo sapiens
attctgacaagtttaatacccatctg

SEQ ID NO: 3461 - DNA, 26 bp, Homo sapiens
ttctgacaagtttaatacccatctgt

SEQ ID NO: 3462 - DNA, 26 bp, Homo sapiens
tctgacaagtttaatacccatctgtg

SEQ ID NO: 3463 - DNA, 26 bp, Homo sapiens
ctgacaagtttaatacccatctgtga

SEQ ID NO: 3464 - DNA, 26 bp, Homo sapiens
tgacaagtttaatacccatctgtgat

SEQ ID NO: 3465 - DNA, 26 bp, Homo sapiens
gacaagtttaatacccatctgtgatt

SEQ ID NO: 3466 - DNA, 26 bp, Homo sapiens
acaagtttaatacccatctgtgattt

SEQ ID NO: 3467 - DNA, 26 bp, Homo sapiens
caagtttaatacccatctgtgattta

SEQ ID NO: 3468 - DNA, 26 bp, Homo sapiens
aagtttaatacccatctgtgatttaa

SEQ ID NO: 3469 - DNA, 26 bp, Homo sapiens
agtttaatacccatctgtgatttaag

SEQ ID NO: 3470 - DNA, 26 bp, Homo sapiens
gtttaatacccatctgtgatttaagt

SEQ ID NO: 3471 - DNA, 26 bp, Homo sapiens
tttaatacccatctgtgatttaagtc

SEQ ID NO: 3472 - DNA, 26 bp, Homo sapiens
ttaatacccatctgtgatttaagtct

SEQ ID NO: 3473 - DNA, 26 bp, Homo sapiens
taatacccatctgtgatttaagtctg

SEQ ID NO: 3474 - DNA, 26 bp, Homo sapiens
aatacccatctgtgatttaagtctgg

SEQ ID NO: 3475 - DNA, 26 bp, Homo sapiens
atacccatctgtgatttaagtctggc

SEQ ID NO: 3476 - DNA, 26 bp, Homo sapiens
tacccatctgtgatttaagtctggca

SEQ ID NO: 3477 - DNA, 26 bp, Homo sapiens
acccatctgtgatttaagtctggcaa

SEQ ID NO: 3478 - DNA, 26 bp, Homo sapiens
cccatctgtgatttaagtctggcaaa

SEQ ID NO: 3479 - DNA, 26 bp, Homo sapiens
ccatctgtgatttaagtctggcaaaa

SEQ ID NO: 3480 - DNA, 26 bp, Homo sapiens
catctgtgatttaagtctggcaaaat

SEQ ID NO: 3481 - DNA, 26 bp, Homo sapiens
atctgtgatttaagtctggcaaaata

SEQ ID NO: 3482 - DNA, 26 bp, Homo sapiens
tctgtgatttaagtctggcaaaatac

SEQ ID NO: 3483 - DNA, 26 bp, Homo sapiens
ctgtgatttaagtctggcaaaataca

SEQ ID NO: 3484 - DNA, 26 bp, Homo sapiens
tgtgatttaagtctggcaaaatacag

SEQ ID NO: 3485 - DNA, 26 bp, Homo sapiens
gtgatttaagtctggcaaaatacagg

SEQ ID NO: 3486 - DNA, 26 bp, Homo sapiens
tgatttaagtctggcaaaatacaggt

SEQ ID NO: 3487 - DNA, 26 bp, Homo sapiens
gatttaagtctggcaaaatacaggtc

SEQ ID NO: 3488 - DNA, 26 bp, Homo sapiens
atttaagtctggcaaaatacaggtca

SEQ ID NO: 3489 - DNA, 26 bp, Homo sapiens
tttaagtctggcaaaatacaggtcat

SEQ ID NO: 3490 - DNA, 26 bp, Homo sapiens
ttaagtctggcaaaatacaggtcatt

SEQ ID NO: 3491 - DNA, 26 bp, Homo sapiens
taagtctggcaaaatacaggtcattg

SEQ ID NO: 3492 - DNA, 26 bp, Homo sapiens
aagtctggcaaaatacaggtcattga

SEQ ID NO: 3493 - DNA, 26 bp, Homo sapiens
agtctggcaaaatacaggtcattgaa

SEQ ID NO: 3494 - DNA, 26 bp, Homo sapiens
gtctggcaaaatacaggtcattgaaa

SEQ ID NO: 3495 - DNA, 26 bp, Homo sapiens
tctggcaaaatacaggtcattgaaac

SEQ ID NO: 3496 - DNA, 26 bp, Homo sapiens
ctggcaaaatacaggtcattgaaaca

SEQ ID NO: 3497 - DNA, 26 bp, Homo sapiens
tggcaaaatacaggtcattgaaacag

SEQ ID NO: 3498 - DNA, 26 bp, Homo sapiens
ggcaaaatacaggtcattgaaacaga

SEQ ID NO: 3499 - DNA, 26 bp, Homo sapiens
gcaaaatacaggtcattgaaacagac

SEQ ID NO: 3500 - DNA, 26 bp, Homo sapiens
caaaatacaggtcattgaaacagaca

SEQ ID NO: 3501 - DNA, 26 bp, Homo sapiens
aaaatacaggtcattgaaacagacat

SEQ ID NO: 3502 - DNA, 26 bp, Homo sapiens
aaatacaggtcattgaaacagacatt

SEQ ID NO: 3503 - DNA, 26 bp, Homo sapiens
aatacaggtcattgaaacagacattt

SEQ ID NO: 3504 - DNA, 26 bp, Homo sapiens
atacaggtcattgaaacagacatttt

SEQ ID NO: 3505 - DNA, 26 bp, Homo sapiens
tacaggtcattgaaacagacatttta

SEQ ID NO: 3506 - DNA, 26 bp, Homo sapiens
acaggtcattgaaacagacattttaa

SEQ ID NO: 3507 - DNA, 26 bp, Homo sapiens
caggtcattgaaacagacattttaac

SEQ ID NO: 3508 - DNA, 26 bp, Homo sapiens
aggtcattgaaacagacattttaact

SEQ ID NO: 3509 - DNA, 26 bp, Homo sapiens
ggtcattgaaacagacattttaactg

SEQ ID NO: 3510 - DNA, 26 bp, Homo sapiens
gtcattgaaacagacattttaactga

SEQ ID NO: 3511 - DNA, 26 bp, Homo sapiens
tcattgaaacagacattttaactgag

SEQ ID NO: 3512 - DNA, 26 bp, Homo sapiens
cattgaaacagacattttaactgagt

SEQ ID NO: 3513 - DNA, 26 bp, Homo sapiens
attgaaacagacattttaactgagtt

SEQ ID NO: 3514 - DNA, 26 bp, Homo sapiens
ttgaaacagacattttaactgagttt

SEQ ID NO: 3515 - DNA, 26 bp, Homo sapiens
tgaaacagacattttaactgagtttt

SEQ ID NO: 3516 - DNA, 26 bp, Homo sapiens
gaaacagacattttaactgagtttta

SEQ ID NO: 3517 - DNA, 26 bp, Homo sapiens
aaacagacattttaactgagttttat

SEQ ID NO: 3518 - DNA, 26 bp, Homo sapiens
aacagacattttaactgagttttata

SEQ ID NO: 3519 - DNA, 26 bp, Homo sapiens
acagacattttaactgagttttataa

SEQ ID NO: 3520 - DNA, 26 bp, Homo sapiens
cagacattttaactgagttttataaa

SEQ ID NO: 3521 - DNA, 26 bp, Homo sapiens
agacattttaactgagttttataaaa

SEQ ID NO: 3522 - DNA, 26 bp, Homo sapiens
gacattttaactgagttttataaaac

SEQ ID NO: 3523 - DNA, 26 bp, Homo sapiens
acattttaactgagttttataaaact

SEQ ID NO: 3524 - DNA, 26 bp, Homo sapiens
cattttaactgagttttataaaacta

SEQ ID NO: 3525 - DNA, 26 bp, Homo sapiens
attttaactgagttttataaaactat

SEQ ID NO: 3526 - DNA, 26 bp, Homo sapiens
ttttaactgagttttataaaactata

SEQ ID NO: 3527 - DNA, 26 bp, Homo sapiens
tttaactgagttttataaaactatac

SEQ ID NO: 3528 - DNA, 26 bp, Homo sapiens
ttaactgagttttataaaactataca

SEQ ID NO: 3529 - DNA, 26 bp, Homo sapiens
taactgagttttataaaactatacaa

SEQ ID NO: 3530 - DNA, 26 bp, Homo sapiens
aactgagttttataaaactatacaaa

SEQ ID NO: 3531 - DNA, 26 bp, Homo sapiens
actgagttttataaaactatacaaat

SEQ ID NO: 3532 - DNA, 26 bp, Homo sapiens
ctgagttttataaaactatacaaatc

SEQ ID NO: 3533 - DNA, 26 bp, Homo sapiens
tgagttttataaaactatacaaatct

SEQ ID NO: 3534 - DNA, 26 bp, Homo sapiens
gagttttataaaactatacaaatctt

SEQ ID NO: 3535 - DNA, 26 bp, Homo sapiens
agttttataaaactatacaaatcttc

SEQ ID NO: 3536 - DNA, 26 bp, Homo sapiens
gttttataaaactatacaaatcttcc

SEQ ID NO: 3537 - DNA, 26 bp, Homo sapiens
ttttataaaactatacaaatcttcca

SEQ ID NO: 3538 - DNA, 26 bp, Homo sapiens
tttataaaactatacaaatcttccaa

SEQ ID NO: 3539 - DNA, 26 bp, Homo sapiens
ttataaaactatacaaatcttccaag

SEQ ID NO: 3540 - DNA, 26 bp, Homo sapiens
tataaaactatacaaatcttccaagt

SEQ ID NO: 3541 - DNA, 26 bp, Homo sapiens
ataaaactatacaaatcttccaagtg

SEQ ID NO: 3542 - DNA, 26 bp, Homo sapiens
taaaactatacaaatcttccaagtga

SEQ ID NO: 3543 - DNA, 26 bp, Homo sapiens
aaaactatacaaatcttccaagtgat

SEQ ID NO: 3544 - DNA, 26 bp, Homo sapiens
aaactatacaaatcttccaagtgatc

SEQ ID NO: 3545 - DNA, 26 bp, Homo sapiens
aactatacaaatcttccaagtgatca

SEQ ID NO: 3546 - DNA, 26 bp, Homo sapiens
actatacaaatcttccaagtgatcat

SEQ ID NO: 3547 - DNA, 26 bp, Homo sapiens
ctatacaaatcttccaagtgatcata

SEQ ID NO: 3548 - DNA, 26 bp, Homo sapiens
tatacaaatcttccaagtgatcataa

SEQ ID NO: 3549 - DNA, 26 bp, Homo sapiens
atacaaatcttccaagtgatcataaa

SEQ ID NO: 3550 - DNA, 26 bp, Homo sapiens
tacaaatcttccaagtgatcataaat

SEQ ID NO: 3551 - DNA, 26 bp, Homo sapiens
acaaatcttccaagtgatcataaatc

SEQ ID NO: 3552 - DNA, 26 bp, Homo sapiens
caaatcttccaagtgatcataaatca

SEQ ID NO: 3553 - DNA, 26 bp, Homo sapiens
aaatcttccaagtgatcataaatcag

SEQ ID NO: 3554 - DNA, 26 bp, Homo sapiens
aatcttccaagtgatcataaatcagt

SEQ ID NO: 3555 - DNA, 26 bp, Homo sapiens
atcttccaagtgatcataaatcagtt

SEQ ID NO: 3556 - DNA, 26 bp, Homo sapiens
tcttccaagtgatcataaatcagttt

SEQ ID NO: 3557 - DNA, 26 bp, Homo sapiens
cttccaagtgatcataaatcagtttc

SEQ ID NO: 3558 - DNA, 26 bp, Homo sapiens
ttccaagtgatcataaatcagtttct

SEQ ID NO: 3559 - DNA, 26 bp, Homo sapiens
tccaagtgatcataaatcagtttctc

SEQ ID NO: 3560 - DNA, 26 bp, Homo sapiens
ccaagtgatcataaatcagtttctca

SEQ ID NO: 3561 - DNA, 26 bp, Homo sapiens
caagtgatcataaatcagtttctcac

SEQ ID NO: 3562 - DNA, 26 bp, Homo sapiens
aagtgatcataaatcagtttctcact

SEQ ID NO: 3563 - DNA, 26 bp, Homo sapiens
agtgatcataaatcagtttctcacta

SEQ ID NO: 3564 - DNA, 26 bp, Homo sapiens
gtgatcataaatcagtttctcactac

SEQ ID NO: 3565 - DNA, 26 bp, Homo sapiens
tgatcataaatcagtttctcactaca

SEQ ID NO: 3566 - DNA, 26 bp, Homo sapiens
gatcataaatcagtttctcactacag

SEQ ID NO: 3567 - DNA, 26 bp, Homo sapiens
atcataaatcagtttctcactacagg

SEQ ID NO: 3568 - DNA, 26 bp, Homo sapiens
tcataaatcagtttctcactacaggt

SEQ ID NO: 3569 - DNA, 26 bp, Homo sapiens
cataaatcagtttctcactacaggta

SEQ ID NO: 3570 - DNA, 26 bp, Homo sapiens
ataaatcagtttctcactacaggtac

SEQ ID NO: 3571 - DNA, 26 bp, Homo sapiens
taaatcagtttctcactacaggtact

SEQ ID NO: 3572 - DNA, 26 bp, Homo sapiens
aaatcagtttctcactacaggtactt

SEQ ID NO: 3573 - DNA, 26 bp, Homo sapiens
aatcagtttctcactacaggtacttt

SEQ ID NO: 3574 - DNA, 26 bp, Homo sapiens
atcagtttctcactacaggtacttta

SEQ ID NO: 3575 - DNA, 26 bp, Homo sapiens
tcagtttctcactacaggtactttaa

SEQ ID NO: 3576 - DNA, 26 bp, Homo sapiens
cagtttctcactacaggtactttaaa

SEQ ID NO: 3577 - DNA, 26 bp, Homo sapiens
agtttctcactacaggtactttaaag

SEQ ID NO: 3578 - DNA, 26 bp, Homo sapiens
gtttctcactacaggtactttaaagc

SEQ ID NO: 3579 - DNA, 26 bp, Homo sapiens
tttctcactacaggtactttaaagca

SEQ ID NO: 3580 - DNA, 26 bp, Homo sapiens
ttctcactacaggtactttaaagcaa

SEQ ID NO: 3581 - DNA, 26 bp, Homo sapiens
tctcactacaggtactttaaagcaac

SEQ ID NO: 3582 - DNA, 26 bp, Homo sapiens
ctcactacaggtactttaaagcaact

SEQ ID NO: 3583 - DNA, 26 bp, Homo sapiens
tcactacaggtactttaaagcaactc

SEQ ID NO: 3584 - DNA, 26 bp, Homo sapiens
cactacaggtactttaaagcaactct

SEQ ID NO: 3585 - DNA, 26 bp, Homo sapiens
actacaggtactttaaagcaactctg

SEQ ID NO: 3586 - DNA, 26 bp, Homo sapiens
ctacaggtactttaaagcaactctga

SEQ ID NO: 3587 - DNA, 26 bp, Homo sapiens
tacaggtactttaaagcaactctgaa

SEQ ID NO: 3588 - DNA, 26 bp, Homo sapiens
acaggtactttaaagcaactctgaaa

SEQ ID NO: 3589 - DNA, 26 bp, Homo sapiens
caggtactttaaagcaactctgaaaa

SEQ ID NO: 3590 - DNA, 26 bp, Homo sapiens
aggtactttaaagcaactctgaaaaa

SEQ ID NO: 3591 - DNA, 26 bp, Homo sapiens
ggtactttaaagcaactctgaaaaag

SEQ ID NO: 3592 - DNA, 26 bp, Homo sapiens
gtactttaaagcaactctgaaaaagt

SEQ ID NO: 3593 - DNA, 26 bp, Homo sapiens
tactttaaagcaactctgaaaaagtc

SEQ ID NO: 3594 - DNA, 26 bp, Homo sapiens
actttaaagcaactctgaaaaagtca

SEQ ID NO: 3595 - DNA, 26 bp, Homo sapiens
ctttaaagcaactctgaaaaagtcac

SEQ ID NO: 3596 - DNA, 26 bp, Homo sapiens
tttaaagcaactctgaaaaagtcaca

SEQ ID NO: 3597 - DNA, 26 bp, Homo sapiens
ttaaagcaactctgaaaaagtcacac

SEQ ID NO: 3598 - DNA, 26 bp, Homo sapiens
taaagcaactctgaaaaagtcacaca

SEQ ID NO: 3599 - DNA, 26 bp, Homo sapiens
aaagcaactctgaaaaagtcacacaa

SEQ ID NO: 3600 - DNA, 26 bp, Homo sapiens
aagcaactctgaaaaagtcacacaat

SEQ ID NO: 3601 - DNA, 26 bp, Homo sapiens
agcaactctgaaaaagtcacacaatt

SEQ ID NO: 3602 - DNA, 26 bp, Homo sapiens
gcaactctgaaaaagtcacacaatta

SEQ ID NO: 3603 - DNA, 26 bp, Homo sapiens
caactctgaaaaagtcacacaattac

SEQ ID NO: 3604 - DNA, 26 bp, Homo sapiens
aactctgaaaaagtcacacaattaca

SEQ ID NO: 3605 - DNA, 26 bp, Homo sapiens
actctgaaaaagtcacacaattacac

SEQ ID NO: 3606 - DNA, 26 bp, Homo sapiens
ctctgaaaaagtcacacaattacact

SEQ ID NO: 3607 - DNA, 26 bp, Homo sapiens
tctgaaaaagtcacacaattacactt

SEQ ID NO: 3608 - DNA, 26 bp, Homo sapiens
ctgaaaaagtcacacaattacacttt

SEQ ID NO: 3609 - DNA, 26 bp, Homo sapiens
tgaaaaagtcacacaattacactttt

SEQ ID NO: 3610 - DNA, 26 bp, Homo sapiens
gaaaaagtcacacaattacactttta

SEQ ID NO: 3611 - DNA, 26 bp, Homo sapiens
aaaaagtcacacaattacacttttaa

SEQ ID NO: 3612 - DNA, 26 bp, Homo sapiens
aaaagtcacacaattacacttttaag

SEQ ID NO: 3613 - DNA, 26 bp, Homo sapiens
aaagtcacacaattacacttttaaga

SEQ ID NO: 3614 - DNA, 26 bp, Homo sapiens
aagtcacacaattacacttttaagat

SEQ ID NO: 3615 - DNA, 26 bp, Homo sapiens
agtcacacaattacacttttaagatt

SEQ ID NO: 3616 - DNA, 26 bp, Homo sapiens
gtcacacaattacacttttaagatta

SEQ ID NO: 3617 - DNA, 26 bp, Homo sapiens
tcacacaattacacttttaagattac

SEQ ID NO: 3618 - DNA, 26 bp, Homo sapiens
cacacaattacacttttaagattaca

SEQ ID NO: 3619 - DNA, 26 bp, Homo sapiens
acacaattacacttttaagattacag

SEQ ID NO: 3620 - DNA, 26 bp, Homo sapiens
cacaattacacttttaagattacagt

SEQ ID NO: 3621 - DNA, 26 bp, Homo sapiens
acaattacacttttaagattacagtg

SEQ ID NO: 3622 - DNA, 26 bp, Homo sapiens
caattacacttttaagattacagtgt

SEQ ID NO: 3623 - DNA, 26 bp, Homo sapiens
aattacacttttaagattacagtgtt

SEQ ID NO: 3624 - DNA, 26 bp, Homo sapiens
attacacttttaagattacagtgttt

SEQ ID NO: 3625 - DNA, 26 bp, Homo sapiens
ttacacttttaagattacagtgttta

SEQ ID NO: 3626 - DNA, 26 bp, Homo sapiens
tacacttttaagattacagtgtttaa

SEQ ID NO: 3627 - DNA, 26 bp, Homo sapiens
acacttttaagattacagtgtttaat

SEQ ID NO: 3628 - DNA, 26 bp, Homo sapiens
cacttttaagattacagtgtttaatg

SEQ ID NO: 3629 - DNA, 26 bp, Homo sapiens
acttttaagattacagtgtttaatgt

SEQ ID NO: 3630 - DNA, 26 bp, Homo sapiens
cttttaagattacagtgtttaatgtt

SEQ ID NO: 3631 - DNA, 26 bp, Homo sapiens
ttttaagattacagtgtttaatgttt

SEQ ID NO: 3632 - DNA, 26 bp, Homo sapiens
tttaagattacagtgtttaatgttta

SEQ ID NO: 3633 - DNA, 26 bp, Homo sapiens
ttaagattacagtgtttaatgtttat

SEQ ID NO: 3634 - DNA, 26 bp, Homo sapiens
taagattacagtgtttaatgtttatc

SEQ ID NO: 3635 - DNA, 26 bp, Homo sapiens
aagattacagtgtttaatgtttatca

SEQ ID NO: 3636 - DNA, 26 bp, Homo sapiens
agattacagtgtttaatgtttatcag

SEQ ID NO: 3637 - DNA, 26 bp, Homo sapiens
gattacagtgtttaatgtttatcagg

SEQ ID NO: 3638 - DNA, 26 bp, Homo sapiens
attacagtgtttaatgtttatcagga

SEQ ID NO: 3639 - DNA, 26 bp, Homo sapiens
ttacagtgtttaatgtttatcaggat

SEQ ID NO: 3640 - DNA, 26 bp, Homo sapiens
tacagtgtttaatgtttatcaggata

SEQ ID NO: 3641 - DNA, 26 bp, Homo sapiens
acagtgtttaatgtttatcaggatac

SEQ ID NO: 3642 - DNA, 26 bp, Homo sapiens
cagtgtttaatgtttatcaggataca

SEQ ID NO: 3643 - DNA, 26 bp, Homo sapiens
agtgtttaatgtttatcaggatacat

SEQ ID NO: 3644 - DNA, 26 bp, Homo sapiens
gtgtttaatgtttatcaggatacatt

SEQ ID NO: 3645 - DNA, 26 bp, Homo sapiens
tgtttaatgtttatcaggatacattt

SEQ ID NO: 3646 - DNA, 26 bp, Homo sapiens
gtttaatgtttatcaggatacatttc

SEQ ID NO: 3647 - DNA, 26 bp, Homo sapiens
tttaatgtttatcaggatacatttct

SEQ ID NO: 3648 - DNA, 26 bp, Homo sapiens
ttaatgtttatcaggatacatttcta

SEQ ID NO: 3649 - DNA, 26 bp, Homo sapiens
taatgtttatcaggatacatttctac

SEQ ID NO: 3650 - DNA, 26 bp, Homo sapiens
aatgtttatcaggatacatttctaca

SEQ ID NO: 3651 - DNA, 26 bp, Homo sapiens
atgtttatcaggatacatttctacag

SEQ ID NO: 3652 - DNA, 26 bp, Homo sapiens
tgtttatcaggatacatttctacagc

SEQ ID NO: 3653 - DNA, 26 bp, Homo sapiens
gtttatcaggatacatttctacagct

SEQ ID NO: 3654 - DNA, 26 bp, Homo sapiens
tttatcaggatacatttctacagcta

SEQ ID NO: 3655 - DNA, 26 bp, Homo sapiens
ttatcaggatacatttctacagctag

SEQ ID NO: 3656 - DNA, 26 bp, Homo sapiens
tatcaggatacatttctacagctagc

SEQ ID NO: 3657 - DNA, 26 bp, Homo sapiens
atcaggatacatttctacagctagca

SEQ ID NO: 3658 - DNA, 26 bp, Homo sapiens
tcaggatacatttctacagctagcag

SEQ ID NO: 3659 - DNA, 26 bp, Homo sapiens
caggatacatttctacagctagcagg

SEQ ID NO: 3660 - DNA, 26 bp, Homo sapiens
aggatacatttctacagctagcagga

SEQ ID NO: 3661 - DNA, 26 bp, Homo sapiens
ggatacatttctacagctagcaggat

SEQ ID NO: 3662 - DNA, 26 bp, Homo sapiens
gatacatttctacagctagcaggata

SEQ ID NO: 3663 - DNA, 26 bp, Homo sapiens
atacatttctacagctagcaggataa

SEQ ID NO: 3664 - DNA, 26 bp, Homo sapiens
tacatttctacagctagcaggataac

SEQ ID NO: 3665 - DNA, 26 bp, Homo sapiens
acatttctacagctagcaggataaca

SEQ ID NO: 3666 - DNA, 26 bp, Homo sapiens
catttctacagctagcaggataacag

SEQ ID NO: 3667 - DNA, 26 bp, Homo sapiens
atttctacagctagcaggataacaga

SEQ ID NO: 3668 - DNA, 26 bp, Homo sapiens
tttctacagctagcaggataacagat

SEQ ID NO: 3669 - DNA, 26 bp, Homo sapiens
ttctacagctagcaggataacagatg

SEQ ID NO: 3670 - DNA, 26 bp, Homo sapiens
tctacagctagcaggataacagatga

SEQ ID NO: 3671 - DNA, 26 bp, Homo sapiens
ctacagctagcaggataacagatgag

SEQ ID NO: 3672 - DNA, 26 bp, Homo sapiens
tacagctagcaggataacagatgagt

SEQ ID NO: 3673 - DNA, 26 bp, Homo sapiens
acagctagcaggataacagatgagtt

SEQ ID NO: 3674 - DNA, 26 bp, Homo sapiens
cagctagcaggataacagatgagtta

SEQ ID NO: 3675 - DNA, 26 bp, Homo sapiens
agctagcaggataacagatgagttaa

SEQ ID NO: 3676 - DNA, 26 bp, Homo sapiens
gctagcaggataacagatgagttaag

SEQ ID NO: 3677 - DNA, 26 bp, Homo sapiens
ctagcaggataacagatgagttaagg

SEQ ID NO: 3678 - DNA, 26 bp, Homo sapiens
tagcaggataacagatgagttaaggg

SEQ ID NO: 3679 - DNA, 26 bp, Homo sapiens
agcaggataacagatgagttaagggg

SEQ ID NO: 3680 - DNA, 26 bp, Homo sapiens
gcaggataacagatgagttaaggggc

SEQ ID NO: 3681 - DNA, 26 bp, Homo sapiens
caggataacagatgagttaaggggcc

SEQ ID NO: 3682 - DNA, 26 bp, Homo sapiens
aggataacagatgagttaaggggcct

SEQ ID NO: 3683 - DNA, 26 bp, Homo sapiens
ggataacagatgagttaaggggcctc

SEQ ID NO: 3684 - DNA, 26 bp, Homo sapiens
gataacagatgagttaaggggcctca

SEQ ID NO: 3685 - DNA, 26 bp, Homo sapiens
ataacagatgagttaaggggcctcag

SEQ ID NO: 3686 - DNA, 26 bp, Homo sapiens
taacagatgagttaaggggcctcaga

SEQ ID NO: 3687 - DNA, 26 bp, Homo sapiens
aacagatgagttaaggggcctcagac

SEQ ID NO: 3688 - DNA, 26 bp, Homo sapiens
acagatgagttaaggggcctcagact

SEQ ID NO: 3689 - DNA, 26 bp, Homo sapiens
cagatgagttaaggggcctcagacta

SEQ ID NO: 3690 - DNA, 26 bp, Homo sapiens
agatgagttaaggggcctcagactac

SEQ ID NO: 3691 - DNA, 26 bp, Homo sapiens
gatgagttaaggggcctcagactaca

SEQ ID NO: 3692 - DNA, 26 bp, Homo sapiens
atgagttaaggggcctcagactacat

SEQ ID NO: 3693 - DNA, 26 bp, Homo sapiens
tgagttaaggggcctcagactacatc

SEQ ID NO: 3694 - DNA, 26 bp, Homo sapiens
gagttaaggggcctcagactacatcc

SEQ ID NO: 3695 - DNA, 26 bp, Homo sapiens
agttaaggggcctcagactacatcca

SEQ ID NO: 3696 - DNA, 26 bp, Homo sapiens
gttaaggggcctcagactacatccaa

SEQ ID NO: 3697 - DNA, 26 bp, Homo sapiens
ttaaggggcctcagactacatccaag

SEQ ID NO: 3698 - DNA, 26 bp, Homo sapiens
taaggggcctcagactacatccaagg

SEQ ID NO: 3699 - DNA, 26 bp, Homo sapiens
aaggggcctcagactacatccaaggg

SEQ ID NO: 3700 - DNA, 26 bp, Homo sapiens
aggggcctcagactacatccaaggga

SEQ ID NO: 3701 - DNA, 26 bp, Homo sapiens
ggggcctcagactacatccaagggaa

SEQ ID NO: 3702 - DNA, 26 bp, Homo sapiens
gggcctcagactacatccaagggaat

SEQ ID NO: 3703 - DNA, 26 bp, Homo sapiens
ggcctcagactacatccaagggaatg

SEQ ID NO: 3704 - DNA, 26 bp, Homo sapiens
gcctcagactacatccaagggaatgt

SEQ ID NO: 3705 - DNA, 26 bp, Homo sapiens
cctcagactacatccaagggaatgtt

SEQ ID NO: 3706 - DNA, 26 bp, Homo sapiens
ctcagactacatccaagggaatgttt

SEQ ID NO: 3707 - DNA, 26 bp, Homo sapiens
tcagactacatccaagggaatgttta

SEQ ID NO: 3708 - DNA, 26 bp, Homo sapiens
cagactacatccaagggaatgtttat

SEQ ID NO: 3709 - DNA, 26 bp, Homo sapiens
agactacatccaagggaatgtttatt

SEQ ID NO: 3710 - DNA, 26 bp, Homo sapiens
gactacatccaagggaatgtttattg

SEQ ID NO: 3711 - DNA, 26 bp, Homo sapiens
actacatccaagggaatgtttattgg

SEQ ID NO: 3712 - DNA, 26 bp, Homo sapiens
ctacatccaagggaatgtttattggg

SEQ ID NO: 3713 - DNA, 26 bp, Homo sapiens
tacatccaagggaatgtttattgggc

SEQ ID NO: 3714 - DNA, 26 bp, Homo sapiens
acatccaagggaatgtttattgggcg

SEQ ID NO: 3715 - DNA, 26 bp, Homo sapiens
catccaagggaatgtttattgggcga

SEQ ID NO: 3716 - DNA, 26 bp, Homo sapiens
atccaagggaatgtttattgggcgat

SEQ ID NO: 3717 - DNA, 26 bp, Homo sapiens
tccaagggaatgtttattgggcgatc

SEQ ID NO: 3718 - DNA, 26 bp, Homo sapiens
ccaagggaatgtttattgggcgatcc

SEQ ID NO: 3719 - DNA, 26 bp, Homo sapiens
caagggaatgtttattgggcgatccc

SEQ ID NO: 3720 - DNA, 26 bp, Homo sapiens
aagggaatgtttattgggcgatccca

SEQ ID NO: 3721 - DNA, 26 bp, Homo sapiens
agggaatgtttattgggcgatcccaa

SEQ ID NO: 3722 - DNA, 26 bp, Homo sapiens
gggaatgtttattgggcgatcccaat

SEQ ID NO: 3723 - DNA, 26 bp, Homo sapiens
ggaatgtttattgggcgatcccaatt

SEQ ID NO: 3724 - DNA, 26 bp, Homo sapiens
gaatgtttattgggcgatcccaatta

SEQ ID NO: 3725 - DNA, 26 bp, Homo sapiens
aatgtttattgggcgatcccaattac

SEQ ID NO: 3726 - DNA, 26 bp, Homo sapiens
atgtttattgggcgatcccaattaca

SEQ ID NO: 3727 - DNA, 26 bp, Homo sapiens
tgtttattgggcgatcccaattacac

SEQ ID NO: 3728 - DNA, 26 bp, Homo sapiens
gtttattgggcgatcccaattacacc

SEQ ID NO: 3729 - DNA, 26 bp, Homo sapiens
tttattgggcgatcccaattacacca

SEQ ID NO: 3730 - DNA, 26 bp, Homo sapiens
ttattgggcgatcccaattacaccac

SEQ ID NO: 3731 - DNA, 26 bp, Homo sapiens
tattgggcgatcccaattacaccaca

SEQ ID NO: 3732 - DNA, 26 bp, Homo sapiens
attgggcgatcccaattacaccacaa

SEQ ID NO: 3733 - DNA, 26 bp, Homo sapiens
ttgggcgatcccaattacaccacaag

SEQ ID NO: 3734 - DNA, 26 bp, Homo sapiens
tgggcgatcccaattacaccacaagc

SEQ ID NO: 3735 - DNA, 26 bp, Homo sapiens
gggcgatcccaattacaccacaagcc

SEQ ID NO: 3736 - DNA, 26 bp, Homo sapiens
ggcgatcccaattacaccacaagcca

SEQ ID NO: 3737 - DNA, 26 bp, Homo sapiens
gcgatcccaattacaccacaagccaa

SEQ ID NO: 3738 - DNA, 26 bp, Homo sapiens
cgatcccaattacaccacaagccaaa

SEQ ID NO: 3739 - DNA, 26 bp, Homo sapiens
gatcccaattacaccacaagccaaac

SEQ ID NO: 3740 - DNA, 26 bp, Homo sapiens
atcccaattacaccacaagccaaacg

SEQ ID NO: 3741 - DNA, 26 bp, Homo sapiens
tcccaattacaccacaagccaaacga

SEQ ID NO: 3742 - DNA, 26 bp, Homo sapiens
cccaattacaccacaagccaaacgac

SEQ ID NO: 3743 - DNA, 26 bp, Homo sapiens
ccaattacaccacaagccaaacgact

SEQ ID NO: 3744 - DNA, 26 bp, Homo sapiens
caattacaccacaagccaaacgactt

SEQ ID NO: 3745 - DNA, 26 bp, Homo sapiens
aattacaccacaagccaaacgacttc

SEQ ID NO: 3746 - DNA, 26 bp, Homo sapiens
attacaccacaagccaaacgacttcc

SEQ ID NO: 3747 - DNA, 26 bp, Homo sapiens
ttacaccacaagccaaacgacttcca

SEQ ID NO: 3748 - DNA, 26 bp, Homo sapiens
tacaccacaagccaaacgacttccag

SEQ ID NO: 3749 - DNA, 26 bp, Homo sapiens
acaccacaagccaaacgacttccagc

SEQ ID NO: 3750 - DNA, 26 bp, Homo sapiens
caccacaagccaaacgacttccagcg

SEQ ID NO: 3751 - DNA, 26 bp, Homo sapiens
accacaagccaaacgacttccagcgt

SEQ ID NO: 3752 - DNA, 26 bp, Homo sapiens
ccacaagccaaacgacttccagcgtt

SEQ ID NO: 3753 - DNA, 26 bp, Homo sapiens
cacaagccaaacgacttccagcgttt

SEQ ID NO: 3754 - DNA, 26 bp, Homo sapiens
acaagccaaacgacttccagcgtttc

SEQ ID NO: 3755 - DNA, 26 bp, Homo sapiens
caagccaaacgacttccagcgtttcc

SEQ ID NO: 3756 - DNA, 26 bp, Homo sapiens
aagccaaacgacttccagcgtttcct

SEQ ID NO: 3757 - DNA, 26 bp, Homo sapiens
agccaaacgacttccagcgtttcctg

SEQ ID NO: 3758 - DNA, 26 bp, Homo sapiens
gccaaacgacttccagcgtttcctgt

SEQ ID NO: 3759 - DNA, 26 bp, Homo sapiens
ccaaacgacttccagcgtttcctgtc

SEQ ID NO: 3760 - DNA, 26 bp, Homo sapiens
caaacgacttccagcgtttcctgtct

SEQ ID NO: 3761 - DNA, 26 bp, Homo sapiens
aaacgacttccagcgtttcctgtctt

SEQ ID NO: 3762 - DNA, 26 bp, Homo sapiens
aacgacttccagcgtttcctgtcttt

SEQ ID NO: 3763 - DNA, 26 bp, Homo sapiens
acgacttccagcgtttcctgtctttg

SEQ ID NO: 3764 - DNA, 26 bp, Homo sapiens
cgacttccagcgtttcctgtctttgt

SEQ ID NO: 3765 - DNA, 26 bp, Homo sapiens
gacttccagcgtttcctgtctttgta

SEQ ID NO: 3766 - DNA, 26 bp, Homo sapiens
acttccagcgtttcctgtctttgtac

SEQ ID NO: 3767 - DNA, 26 bp, Homo sapiens
cttccagcgtttcctgtctttgtact

SEQ ID NO: 3768 - DNA, 26 bp, Homo sapiens
ttccagcgtttcctgtctttgtactt

SEQ ID NO: 3769 - DNA, 26 bp, Homo sapiens
tccagcgtttcctgtctttgtacttt

SEQ ID NO: 3770 - DNA, 26 bp, Homo sapiens
ccagcgtttcctgtctttgtactttc

SEQ ID NO: 3771 - DNA, 26 bp, Homo sapiens
cagcgtttcctgtctttgtactttct

SEQ ID NO: 3772 - DNA, 26 bp, Homo sapiens
agcgtttcctgtctttgtactttctt

SEQ ID NO: 3773 - DNA, 26 bp, Homo sapiens
gcgtttcctgtctttgtactttcttc

SEQ ID NO: 3774 - DNA, 26 bp, Homo sapiens
cgtttcctgtctttgtactttcttca

SEQ ID NO: 3775 - DNA, 26 bp, Homo sapiens
gtttcctgtctttgtactttcttcat

SEQ ID NO: 3776 - DNA, 26 bp, Homo sapiens
tttcctgtctttgtactttcttcatt

SEQ ID NO: 3777 - DNA, 26 bp, Homo sapiens
ttcctgtctttgtactttcttcattt

SEQ ID NO: 3778 - DNA, 26 bp, Homo sapiens
tcctgtctttgtactttcttcatttc

SEQ ID NO: 3779 - DNA, 26 bp, Homo sapiens
cctgtctttgtactttcttcatttcc

SEQ ID NO: 3780 - DNA, 26 bp, Homo sapiens
ctgtctttgtactttcttcatttcca

SEQ ID NO: 3781 - DNA, 26 bp, Homo sapiens
tgtctttgtactttcttcatttccac

SEQ ID NO: 3782 - DNA, 26 bp, Homo sapiens
gtctttgtactttcttcatttccacc

SEQ ID NO: 3783 - DNA, 26 bp, Homo sapiens
tctttgtactttcttcatttccacct

SEQ ID NO: 3784 - DNA, 26 bp, Homo sapiens
ctttgtactttcttcatttccacctt

SEQ ID NO: 3785 - DNA, 26 bp, Homo sapiens
tttgtactttcttcatttccaccttt

SEQ ID NO: 3786 - DNA, 26 bp, Homo sapiens
ttgtactttcttcatttccacctttg

SEQ ID NO: 3787 - DNA, 26 bp, Homo sapiens
tgtactttcttcatttccacctttgc

SEQ ID NO: 3788 - DNA, 26 bp, Homo sapiens
gtactttcttcatttccacctttgcc

SEQ ID NO: 3789 - DNA, 26 bp, Homo sapiens
tactttcttcatttccacctttgccc

SEQ ID NO: 3790 - DNA, 26 bp, Homo sapiens
actttcttcatttccacctttgccca

SEQ ID NO: 3791 - DNA, 26 bp, Homo sapiens
ctttcttcatttccacctttgcccaa

SEQ ID NO: 3792 - DNA, 26 bp, Homo sapiens
tttcttcatttccacctttgcccaag

SEQ ID NO: 3793 - DNA, 26 bp, Homo sapiens
ttcttcatttccacctttgcccaagt

SEQ ID NO: 3794 - DNA, 26 bp, Homo sapiens
tcttcatttccacctttgcccaagtc

SEQ ID NO: 3795 - DNA, 26 bp, Homo sapiens
cttcatttccacctttgcccaagtca

SEQ ID NO: 3796 - DNA, 26 bp, Homo sapiens
ttcatttccacctttgcccaagtcat

SEQ ID NO: 3797 - DNA, 26 bp, Homo sapiens
tcatttccacctttgcccaagtcatc

SEQ ID NO: 3798 - DNA, 26 bp, Homo sapiens
catttccacctttgcccaagtcatct

SEQ ID NO: 3799 - DNA, 26 bp, Homo sapiens
atttccacctttgcccaagtcatctg

SEQ ID NO: 3800 - DNA, 26 bp, Homo sapiens
tttccacctttgcccaagtcatctgc

SEQ ID NO: 3801 - DNA, 26 bp, Homo sapiens
ttccacctttgcccaagtcatctgct

SEQ ID NO: 3802 - DNA, 26 bp, Homo sapiens
tccacctttgcccaagtcatctgctt

SEQ ID NO: 3803 - DNA, 26 bp, Homo sapiens
ccacctttgcccaagtcatctgcttt

SEQ ID NO: 3804 - DNA, 26 bp, Homo sapiens
cacctttgcccaagtcatctgctttt

SEQ ID NO: 3805 - DNA, 26 bp, Homo sapiens
acctttgcccaagtcatctgcttttt

SEQ ID NO: 3806 - DNA, 26 bp, Homo sapiens
cctttgcccaagtcatctgctttttc

SEQ ID NO: 3807 - DNA, 26 bp, Homo sapiens
ctttgcccaagtcatctgctttttca

SEQ ID NO: 3808 - DNA, 26 bp, Homo sapiens
tttgcccaagtcatctgctttttcat

SEQ ID NO: 3809 - DNA, 26 bp, Homo sapiens
ttgcccaagtcatctgctttttcatg

SEQ ID NO: 3810 - DNA, 26 bp, Homo sapiens
tgcccaagtcatctgctttttcatgg

SEQ ID NO: 3811 - DNA, 26 bp, Homo sapiens
gcccaagtcatctgctttttcatgga

SEQ ID NO: 3812 - DNA, 26 bp, Homo sapiens
cccaagtcatctgctttttcatggac

SEQ ID NO: 3813 - DNA, 26 bp, Homo sapiens
ccaagtcatctgctttttcatggacc

SEQ ID NO: 3814 - DNA, 26 bp, Homo sapiens
caagtcatctgctttttcatggacca

SEQ ID NO: 3815 - DNA, 26 bp, Homo sapiens
aagtcatctgctttttcatggaccac

SEQ ID NO: 3816 - DNA, 26 bp, Homo sapiens
agtcatctgctttttcatggaccacc

SEQ ID NO: 3817 - DNA, 26 bp, Homo sapiens
gtcatctgctttttcatggaccacca

SEQ ID NO: 3818 - DNA, 26 bp, Homo sapiens
tcatctgctttttcatggaccaccag

SEQ ID NO: 3819 - DNA, 26 bp, Homo sapiens
catctgctttttcatggaccaccagt

SEQ ID NO: 3820 - DNA, 26 bp, Homo sapiens
atctgctttttcatggaccaccagtg

SEQ ID NO: 3821 - DNA, 26 bp, Homo sapiens
tctgctttttcatggaccaccagtgt

SEQ ID NO: 3822 - DNA, 26 bp, Homo sapiens
ctgctttttcatggaccaccagtgtg

SEQ ID NO: 3823 - DNA, 26 bp, Homo sapiens
tgctttttcatggaccaccagtgtgc

SEQ ID NO: 3824 - DNA, 26 bp, Homo sapiens
gctttttcatggaccaccagtgtgcg

SEQ ID NO: 3825 - DNA, 26 bp, Homo sapiens
ctttttcatggaccaccagtgtgcgg

SEQ ID NO: 3826 - DNA, 26 bp, Homo sapiens
tttttcatggaccaccagtgtgcggc

SEQ ID NO: 3827 - DNA, 26 bp, Homo sapiens
ttttcatggaccaccagtgtgcggcc

SEQ ID NO: 3828 - DNA, 26 bp, Homo sapiens
tttcatggaccaccagtgtgcggcca

SEQ ID NO: 3829 - DNA, 26 bp, Homo sapiens
ttcatggaccaccagtgtgcggccaa

SEQ ID NO: 3830 - DNA, 26 bp, Homo sapiens
tcatggaccaccagtgtgcggccaat

SEQ ID NO: 3831 - DNA, 26 bp, Homo sapiens
catggaccaccagtgtgcggccaatg

SEQ ID NO: 3832 - DNA, 26 bp, Homo sapiens
atggaccaccagtgtgcggccaatga

SEQ ID NO: 3833 - DNA, 26 bp, Homo sapiens
tggaccaccagtgtgcggccaatgat

SEQ ID NO: 3834 - DNA, 26 bp, Homo sapiens
ggaccaccagtgtgcggccaatgatg

SEQ ID NO: 3835 - DNA, 26 bp, Homo sapiens
gaccaccagtgtgcggccaatgatgc

SEQ ID NO: 3836 - DNA, 26 bp, Homo sapiens
accaccagtgtgcggccaatgatgca

SEQ ID NO: 3837 - DNA, 26 bp, Homo sapiens
ccaccagtgtgcggccaatgatgcaa

SEQ ID NO: 3838 - DNA, 26 bp, Homo sapiens
caccagtgtgcggccaatgatgcaat

SEQ ID NO: 3839 - DNA, 26 bp, Homo sapiens
accagtgtgcggccaatgatgcaatg

SEQ ID NO: 3840 - DNA, 26 bp, Homo sapiens
ccagtgtgcggccaatgatgcaatgg

SEQ ID NO: 3841 - DNA, 26 bp, Homo sapiens
cagtgtgcggccaatgatgcaatggt

SEQ ID NO: 3842 - DNA, 26 bp, Homo sapiens
agtgtgcggccaatgatgcaatggtc

SEQ ID NO: 3843 - DNA, 26 bp, Homo sapiens
gtgtgcggccaatgatgcaatggtct

SEQ ID NO: 3844 - DNA, 26 bp, Homo sapiens
tgtgcggccaatgatgcaatggtctc

SEQ ID NO: 3845 - DNA, 26 bp, Homo sapiens
gtgcggccaatgatgcaatggtctcc

SEQ ID NO: 3846 - DNA, 26 bp, Homo sapiens
tgcggccaatgatgcaatggtctcct

SEQ ID NO: 3847 - DNA, 26 bp, Homo sapiens
gcggccaatgatgcaatggtctcctg

SEQ ID NO: 3848 - DNA, 26 bp, Homo sapiens
cggccaatgatgcaatggtctcctga

SEQ ID NO: 3849 - DNA, 26 bp, Homo sapiens
ggccaatgatgcaatggtctcctgag

SEQ ID NO: 3850 - DNA, 26 bp, Homo sapiens
gccaatgatgcaatggtctcctgaga

SEQ ID NO: 3851 - DNA, 26 bp, Homo sapiens
ccaatgatgcaatggtctcctgagag

SEQ ID NO: 3852 - DNA, 26 bp, Homo sapiens
caatgatgcaatggtctcctgagagt

SEQ ID NO: 3853 - DNA, 26 bp, Homo sapiens
aatgatgcaatggtctcctgagagtg

SEQ ID NO: 3854 - DNA, 26 bp, Homo sapiens
atgatgcaatggtctcctgagagtga

SEQ ID NO: 3855 - DNA, 26 bp, Homo sapiens
tgatgcaatggtctcctgagagtgag

SEQ ID NO: 3856 - DNA, 26 bp, Homo sapiens
gatgcaatggtctcctgagagtgaga

SEQ ID NO: 3857 - DNA, 26 bp, Homo sapiens
atgcaatggtctcctgagagtgagat

SEQ ID NO: 3858 - DNA, 26 bp, Homo sapiens
tgcaatggtctcctgagagtgagatc

SEQ ID NO: 3859 - DNA, 26 bp, Homo sapiens
gcaatggtctcctgagagtgagatca

SEQ ID NO: 3860 - DNA, 26 bp, Homo sapiens
caatggtctcctgagagtgagatcac

SEQ ID NO: 3861 - DNA, 26 bp, Homo sapiens
aatggtctcctgagagtgagatcaca

SEQ ID NO: 3862 - DNA, 26 bp, Homo sapiens
atggtctcctgagagtgagatcacag

SEQ ID NO: 3863 - DNA, 26 bp, Homo sapiens
tggtctcctgagagtgagatcacaga

SEQ ID NO: 3864 - DNA, 26 bp, Homo sapiens
ggtctcctgagagtgagatcacagaa

SEQ ID NO: 3865 - DNA, 26 bp, Homo sapiens
gtctcctgagagtgagatcacagaat

SEQ ID NO: 3866 - DNA, 26 bp, Homo sapiens
tctcctgagagtgagatcacagaatc

SEQ ID NO: 3867 - DNA, 26 bp, Homo sapiens
ctcctgagagtgagatcacagaatct

SEQ ID NO: 3868 - DNA, 26 bp, Homo sapiens
tcctgagagtgagatcacagaatctt

SEQ ID NO: 3869 - DNA, 26 bp, Homo sapiens
cctgagagtgagatcacagaatcttc

SEQ ID NO: 3870 - DNA, 26 bp, Homo sapiens
ctgagagtgagatcacagaatcttca

SEQ ID NO: 3871 - DNA, 26 bp, Homo sapiens
tgagagtgagatcacagaatcttcaa

SEQ ID NO: 3872 - DNA, 26 bp, Homo sapiens
gagagtgagatcacagaatcttcaat

SEQ ID NO: 3873 - DNA, 26 bp, Homo sapiens
agagtgagatcacagaatcttcaata

SEQ ID NO: 3874 - DNA, 26 bp, Homo sapiens
gagtgagatcacagaatcttcaatag

SEQ ID NO: 3875 - DNA, 26 bp, Homo sapiens
agtgagatcacagaatcttcaataga

SEQ ID NO: 3876 - DNA, 26 bp, Homo sapiens
gtgagatcacagaatcttcaatagac

SEQ ID NO: 3877 - DNA, 26 bp, Homo sapiens
tgagatcacagaatcttcaatagaca

SEQ ID NO: 3878 - DNA, 26 bp, Homo sapiens
gagatcacagaatcttcaatagacac

SEQ ID NO: 3879 - DNA, 26 bp, Homo sapiens
agatcacagaatcttcaatagacaca

SEQ ID NO: 3880 - DNA, 26 bp, Homo sapiens
gatcacagaatcttcaatagacacat

SEQ ID NO: 3881 - DNA, 26 bp, Homo sapiens
atcacagaatcttcaatagacacatc

SEQ ID NO: 3882 - DNA, 26 bp, Homo sapiens
tcacagaatcttcaatagacacatcg

SEQ ID NO: 3883 - DNA, 26 bp, Homo sapiens
cacagaatcttcaatagacacatcgg

SEQ ID NO: 3884 - DNA, 26 bp, Homo sapiens
acagaatcttcaatagacacatcggc

SEQ ID NO: 3885 - DNA, 26 bp, Homo sapiens
cagaatcttcaatagacacatcggcc

SEQ ID NO: 3886 - DNA, 26 bp, Homo sapiens
agaatcttcaatagacacatcggcca

SEQ ID NO: 3887 - DNA, 26 bp, Homo sapiens
gaatcttcaatagacacatcggccac

SEQ ID NO: 3888 - DNA, 26 bp, Homo sapiens
aatcttcaatagacacatcggccaca

SEQ ID NO: 3889 - DNA, 26 bp, Homo sapiens
atcttcaatagacacatcggccacac

SEQ ID NO: 3890 - DNA, 26 bp, Homo sapiens
tcttcaatagacacatcggccacacc

SEQ ID NO: 3891 - DNA, 26 bp, Homo sapiens
cttcaatagacacatcggccacacca

SEQ ID NO: 3892 - DNA, 26 bp, Homo sapiens
ttcaatagacacatcggccacaccat

SEQ ID NO: 3893 - DNA, 26 bp, Homo sapiens
tcaatagacacatcggccacaccatc

SEQ ID NO: 3894 - DNA, 26 bp, Homo sapiens
caatagacacatcggccacaccatct

SEQ ID NO: 3895 - DNA, 26 bp, Homo sapiens
aatagacacatcggccacaccatctt

SEQ ID NO: 3896 - DNA, 26 bp, Homo sapiens
atagacacatcggccacaccatcttt

SEQ ID NO: 3897 - DNA, 26 bp, Homo sapiens
tagacacatcggccacaccatctttg

SEQ ID NO: 3898 - DNA, 26 bp, Homo sapiens
agacacatcggccacaccatctttgt

SEQ ID NO: 3899 - DNA, 26 bp, Homo sapiens
gacacatcggccacaccatctttgtc

SEQ ID NO: 3900 - DNA, 26 bp, Homo sapiens
acacatcggccacaccatctttgtca

SEQ ID NO: 3901 - DNA, 26 bp, Homo sapiens
cacatcggccacaccatctttgtcag

SEQ ID NO: 3902 - DNA, 26 bp, Homo sapiens
acatcggccacaccatctttgtcagc

SEQ ID NO: 3903 - DNA, 26 bp, Homo sapiens
catcggccacaccatctttgtcagca

SEQ ID NO: 3904 - DNA, 26 bp, Homo sapiens
atcggccacaccatctttgtcagcag

SEQ ID NO: 3905 - DNA, 26 bp, Homo sapiens
tcggccacaccatctttgtcagcagt

SEQ ID NO: 3906 - DNA, 26 bp, Homo sapiens
cggccacaccatctttgtcagcagtc

SEQ ID NO: 3907 - DNA, 26 bp, Homo sapiens
ggccacaccatctttgtcagcagtca

SEQ ID NO: 3908 - DNA, 26 bp, Homo sapiens
gccacaccatctttgtcagcagtcac

SEQ ID NO: 3909 - DNA, 26 bp, Homo sapiens
ccacaccatctttgtcagcagtcaca

SEQ ID NO: 3910 - DNA, 26 bp, Homo sapiens
cacaccatctttgtcagcagtcacat

SEQ ID NO: 3911 - DNA, 26 bp, Homo sapiens
acaccatctttgtcagcagtcacatt

SEQ ID NO: 3912 - DNA, 26 bp, Homo sapiens
caccatctttgtcagcagtcacattg

SEQ ID NO: 3913 - DNA, 26 bp, Homo sapiens
accatctttgtcagcagtcacattgc

SEQ ID NO: 3914 - DNA, 26 bp, Homo sapiens
ccatctttgtcagcagtcacattgcc

SEQ ID NO: 3915 - DNA, 26 bp, Homo sapiens
catctttgtcagcagtcacattgccc

SEQ ID NO: 3916 - DNA, 26 bp, Homo sapiens
atctttgtcagcagtcacattgccca

SEQ ID NO: 3917 - DNA, 26 bp, Homo sapiens
tctttgtcagcagtcacattgcccaa

SEQ ID NO: 3918 - DNA, 26 bp, Homo sapiens
ctttgtcagcagtcacattgcccaag

SEQ ID NO: 3919 - DNA, 26 bp, Homo sapiens
tttgtcagcagtcacattgcccaagt

SEQ ID NO: 3920 - DNA, 26 bp, Homo sapiens
ttgtcagcagtcacattgcccaagtc

SEQ ID NO: 3921 - DNA, 26 bp, Homo sapiens
tgtcagcagtcacattgcccaagtct

SEQ ID NO: 3922 - DNA, 26 bp, Homo sapiens
gtcagcagtcacattgcccaagtctc

SEQ ID NO: 3923 - DNA, 26 bp, Homo sapiens
tcagcagtcacattgcccaagtctcc

SEQ ID NO: 3924 - DNA, 26 bp, Homo sapiens
cagcagtcacattgcccaagtctcca

SEQ ID NO: 3925 - DNA, 26 bp, Homo sapiens
agcagtcacattgcccaagtctccaa

SEQ ID NO: 3926 - DNA, 26 bp, Homo sapiens
gcagtcacattgcccaagtctccaac

SEQ ID NO: 3927 - DNA, 26 bp, Homo sapiens
cagtcacattgcccaagtctccaaca

SEQ ID NO: 3928 - DNA, 26 bp, Homo sapiens
agtcacattgcccaagtctccaacat

SEQ ID NO: 3929 - DNA, 26 bp, Homo sapiens
gtcacattgcccaagtctccaacatg

SEQ ID NO: 3930 - DNA, 26 bp, Homo sapiens
tcacattgcccaagtctccaacatgc

SEQ ID NO: 3931 - DNA, 26 bp, Homo sapiens
cacattgcccaagtctccaacatgcc

SEQ ID NO: 3932 - DNA, 26 bp, Homo sapiens
acattgcccaagtctccaacatgcct

SEQ ID NO: 3933 - DNA, 26 bp, Homo sapiens
cattgcccaagtctccaacatgcctc

SEQ ID NO: 3934 - DNA, 26 bp, Homo sapiens
attgcccaagtctccaacatgcctct

SEQ ID NO: 3935 - DNA, 26 bp, Homo sapiens
ttgcccaagtctccaacatgcctctc

SEQ ID NO: 3936 - DNA, 26 bp, Homo sapiens
tgcccaagtctccaacatgcctctct

SEQ ID NO: 3937 - DNA, 26 bp, Homo sapiens
gcccaagtctccaacatgcctctctt

SEQ ID NO: 3938 - DNA, 26 bp, Homo sapiens
cccaagtctccaacatgcctctcttc

SEQ ID NO: 3939 - DNA, 26 bp, Homo sapiens
ccaagtctccaacatgcctctcttca

SEQ ID NO: 3940 - DNA, 26 bp, Homo sapiens
caagtctccaacatgcctctcttcat

SEQ ID NO: 3941 - DNA, 26 bp, Homo sapiens
aagtctccaacatgcctctcttcatc

SEQ ID NO: 3942 - DNA, 26 bp, Homo sapiens
agtctccaacatgcctctcttcatcc

SEQ ID NO: 3943 - DNA, 26 bp, Homo sapiens
gtctccaacatgcctctcttcatcct

SEQ ID NO: 3944 - DNA, 26 bp, Homo sapiens
tctccaacatgcctctcttcatcctt

SEQ ID NO: 3945 - DNA, 26 bp, Homo sapiens
ctccaacatgcctctcttcatccttt

SEQ ID NO: 3946 - DNA, 26 bp, Homo sapiens
tccaacatgcctctcttcatcctttg

SEQ ID NO: 3947 - DNA, 26 bp, Homo sapiens
ccaacatgcctctcttcatcctttgg

SEQ ID NO: 3948 - DNA, 26 bp, Homo sapiens
caacatgcctctcttcatcctttggc

SEQ ID NO: 3949 - DNA, 26 bp, Homo sapiens
aacatgcctctcttcatcctttggcc

SEQ ID NO: 3950 - DNA, 26 bp, Homo sapiens
acatgcctctcttcatcctttggccc

SEQ ID NO: 3951 - DNA, 26 bp, Homo sapiens
catgcctctcttcatcctttggccca

SEQ ID NO: 3952 - DNA, 26 bp, Homo sapiens
atgcctctcttcatcctttggcccac

SEQ ID NO: 3953 - DNA, 26 bp, Homo sapiens
tgcctctcttcatcctttggcccacc

SEQ ID NO: 3954 - DNA, 26 bp, Homo sapiens
gcctctcttcatcctttggcccaccg

SEQ ID NO: 3955 - DNA, 26 bp, Homo sapiens
cctctcttcatcctttggcccaccgt

SEQ ID NO: 3956 - DNA, 26 bp, Homo sapiens
ctctcttcatcctttggcccaccgtg

SEQ ID NO: 3957 - DNA, 26 bp, Homo sapiens
tctcttcatcctttggcccaccgtgt

SEQ ID NO: 3958 - DNA, 26 bp, Homo sapiens
ctcttcatcctttggcccaccgtgtt

SEQ ID NO: 3959 - DNA, 26 bp, Homo sapiens
tcttcatcctttggcccaccgtgttt

SEQ ID NO: 3960 - DNA, 26 bp, Homo sapiens
cttcatcctttggcccaccgtgtttt

SEQ ID NO: 3961 - DNA, 26 bp, Homo sapiens
ttcatcctttggcccaccgtgttttc

SEQ ID NO: 3962 - DNA, 26 bp, Homo sapiens
tcatcctttggcccaccgtgttttct

SEQ ID NO: 3963 - DNA, 26 bp, Homo sapiens
catcctttggcccaccgtgttttctg

SEQ ID NO: 3964 - DNA, 26 bp, Homo sapiens
atcctttggcccaccgtgttttctgg

SEQ ID NO: 3965 - DNA, 26 bp, Homo sapiens
tcctttggcccaccgtgttttctgga

SEQ ID NO: 3966 - DNA, 26 bp, Homo sapiens
cctttggcccaccgtgttttctggat

SEQ ID NO: 3967 - DNA, 26 bp, Homo sapiens
ctttggcccaccgtgttttctggata

SEQ ID NO: 3968 - DNA, 26 bp, Homo sapiens
tttggcccaccgtgttttctggatag

SEQ ID NO: 3969 - DNA, 26 bp, Homo sapiens
ttggcccaccgtgttttctggataga

SEQ ID NO: 3970 - DNA, 26 bp, Homo sapiens
tggcccaccgtgttttctggatagag

SEQ ID NO: 3971 - DNA, 26 bp, Homo sapiens
ggcccaccgtgttttctggatagagg

SEQ ID NO: 3972 - DNA, 26 bp, Homo sapiens
gcccaccgtgttttctggatagagga

SEQ ID NO: 3973 - DNA, 26 bp, Homo sapiens
cccaccgtgttttctggatagaggat

SEQ ID NO: 3974 - DNA, 26 bp, Homo sapiens
ccaccgtgttttctggatagaggatt

SEQ ID NO: 3975 - DNA, 26 bp, Homo sapiens
caccgtgttttctggatagaggatta

SEQ ID NO: 3976 - DNA, 26 bp, Homo sapiens
accgtgttttctggatagaggattaa

SEQ ID NO: 3977 - DNA, 26 bp, Homo sapiens
ccgtgttttctggatagaggattaaa

SEQ ID NO: 3978 - DNA, 26 bp, Homo sapiens
cgtgttttctggatagaggattaaag

SEQ ID NO: 3979 - DNA, 26 bp, Homo sapiens
gtgttttctggatagaggattaaagt

SEQ ID NO: 3980 - DNA, 26 bp, Homo sapiens
tgttttctggatagaggattaaagtg

SEQ ID NO: 3981 - DNA, 26 bp, Homo sapiens
gttttctggatagaggattaaagtga

SEQ ID NO: 3982 - DNA, 26 bp, Homo sapiens
ttttctggatagaggattaaagtgag

SEQ ID NO: 3983 - DNA, 26 bp, Homo sapiens
tttctggatagaggattaaagtgagg

SEQ ID NO: 3984 - DNA, 26 bp, Homo sapiens
ttctggatagaggattaaagtgagga

SEQ ID NO: 3985 - DNA, 26 bp, Homo sapiens
tctggatagaggattaaagtgaggac

SEQ ID NO: 3986 - DNA, 26 bp, Homo sapiens
ctggatagaggattaaagtgaggacc

SEQ ID NO: 3987 - DNA, 26 bp, Homo sapiens
tggatagaggattaaagtgaggacct

SEQ ID NO: 3988 - DNA, 26 bp, Homo sapiens
ggatagaggattaaagtgaggacctg

SEQ ID NO: 3989 - DNA, 26 bp, Homo sapiens
gatagaggattaaagtgaggacctgc

SEQ ID NO: 3990 - DNA, 26 bp, Homo sapiens
atagaggattaaagtgaggacctgca

SEQ ID NO: 3991 - DNA, 26 bp, Homo sapiens
tagaggattaaagtgaggacctgcac

SEQ ID NO: 3992 - DNA, 26 bp, Homo sapiens
agaggattaaagtgaggacctgcact

SEQ ID NO: 3993 - DNA, 26 bp, Homo sapiens
gaggattaaagtgaggacctgcactg

SEQ ID NO: 3994 - DNA, 26 bp, Homo sapiens
aggattaaagtgaggacctgcactgg

SEQ ID NO: 3995 - DNA, 26 bp, Homo sapiens
ggattaaagtgaggacctgcactggt

SEQ ID NO: 3996 - DNA, 26 bp, Homo sapiens
gattaaagtgaggacctgcactggta

SEQ ID NO: 3997 - DNA, 26 bp, Homo sapiens
attaaagtgaggacctgcactggtac

SEQ ID NO: 3998 - DNA, 26 bp, Homo sapiens
ttaaagtgaggacctgcactggtaca

SEQ ID NO: 3999 - DNA, 26 bp, Homo sapiens
taaagtgaggacctgcactggtacag

SEQ ID NO: 4000 - DNA, 26 bp, Homo sapiens
aaagtgaggacctgcactggtacagc

SEQ ID NO: 4001 - DNA, 26 bp, Homo sapiens
aagtgaggacctgcactggtacagcc

SEQ ID NO: 4002 - DNA, 26 bp, Homo sapiens
agtgaggacctgcactggtacagcct

SEQ ID NO: 4003 - DNA, 26 bp, Homo sapiens
gtgaggacctgcactggtacagcctg

SEQ ID NO: 4004 - DNA, 26 bp, Homo sapiens
tgaggacctgcactggtacagcctgc

SEQ ID NO: 4005 - DNA, 26 bp, Homo sapiens
gaggacctgcactggtacagcctgct

SEQ ID NO: 4006 - DNA, 26 bp, Homo sapiens
aggacctgcactggtacagcctgctg

SEQ ID NO: 4007 - DNA, 26 bp, Homo sapiens
ggacctgcactggtacagcctgctgt

SEQ ID NO: 4008 - DNA, 26 bp, Homo sapiens
gacctgcactggtacagcctgctgta

SEQ ID NO: 4009 - DNA, 26 bp, Homo sapiens
acctgcactggtacagcctgctgtat

SEQ ID NO: 4010 - DNA, 26 bp, Homo sapiens
cctgcactggtacagcctgctgtatt

SEQ ID NO: 4011 - DNA, 26 bp, Homo sapiens
ctgcactggtacagcctgctgtatta

SEQ ID NO: 4012 - DNA, 26 bp, Homo sapiens
tgcactggtacagcctgctgtattat

SEQ ID NO: 4013 - DNA, 26 bp, Homo sapiens
gcactggtacagcctgctgtattatc

SEQ ID NO: 4014 - DNA, 26 bp, Homo sapiens
cactggtacagcctgctgtattatct

SEQ ID NO: 4015 - DNA, 26 bp, Homo sapiens
actggtacagcctgctgtattatctc

SEQ ID NO: 4016 - DNA, 26 bp, Homo sapiens
ctggtacagcctgctgtattatctcc

SEQ ID NO: 4017 - DNA, 26 bp, Homo sapiens
tggtacagcctgctgtattatctcca

SEQ ID NO: 4018 - DNA, 26 bp, Homo sapiens
ggtacagcctgctgtattatctccaa

SEQ ID NO: 4019 - DNA, 26 bp, Homo sapiens
gtacagcctgctgtattatctccaaa

SEQ ID NO: 4020 - DNA, 26 bp, Homo sapiens
tacagcctgctgtattatctccaaac

SEQ ID NO: 4021 - DNA, 26 bp, Homo sapiens
acagcctgctgtattatctccaaact

SEQ ID NO: 4022 - DNA, 26 bp, Homo sapiens
cagcctgctgtattatctccaaactc

SEQ ID NO: 4023 - DNA, 26 bp, Homo sapiens
agcctgctgtattatctccaaactca

SEQ ID NO: 4024 - DNA, 26 bp, Homo sapiens
gcctgctgtattatctccaaactcat

SEQ ID NO: 4025 - DNA, 26 bp, Homo sapiens
cctgctgtattatctccaaactcatg

SEQ ID NO: 4026 - DNA, 26 bp, Homo sapiens
ctgctgtattatctccaaactcatga

SEQ ID NO: 4027 - DNA, 26 bp, Homo sapiens
tgctgtattatctccaaactcatgaa

SEQ ID NO: 4028 - DNA, 26 bp, Homo sapiens
gctgtattatctccaaactcatgaac

SEQ ID NO: 4029 - DNA, 26 bp, Homo sapiens
ctgtattatctccaaactcatgaaca

SEQ ID NO: 4030 - DNA, 26 bp, Homo sapiens
tgtattatctccaaactcatgaacat

SEQ ID NO: 4031 - DNA, 26 bp, Homo sapiens
gtattatctccaaactcatgaacatg

SEQ ID NO: 4032 - DNA, 26 bp, Homo sapiens
tattatctccaaactcatgaacatgg

SEQ ID NO: 4033 - DNA, 26 bp, Homo sapiens
attatctccaaactcatgaacatgga

SEQ ID NO: 4034 - DNA, 26 bp, Homo sapiens
ttatctccaaactcatgaacatggaa

SEQ ID NO: 4035 - DNA, 26 bp, Homo sapiens
tatctccaaactcatgaacatggaat

SEQ ID NO: 4036 - DNA, 26 bp, Homo sapiens
atctccaaactcatgaacatggaatc

SEQ ID NO: 4037 - DNA, 26 bp, Homo sapiens
tctccaaactcatgaacatggaatcc

SEQ ID NO: 4038 - DNA, 26 bp, Homo sapiens
ctccaaactcatgaacatggaatcca

SEQ ID NO: 4039 - DNA, 26 bp, Homo sapiens
tccaaactcatgaacatggaatccat

SEQ ID NO: 4040 - DNA, 26 bp, Homo sapiens
ccaaactcatgaacatggaatccatg

SEQ ID NO: 4041 - DNA, 26 bp, Homo sapiens
caaactcatgaacatggaatccatgc

SEQ ID NO: 4042 - DNA, 26 bp, Homo sapiens
aaactcatgaacatggaatccatgca

SEQ ID NO: 4043 - DNA, 26 bp, Homo sapiens
aactcatgaacatggaatccatgcag

SEQ ID NO: 4044 - DNA, 26 bp, Homo sapiens
actcatgaacatggaatccatgcagg

SEQ ID NO: 4045 - DNA, 26 bp, Homo sapiens
ctcatgaacatggaatccatgcaggc

SEQ ID NO: 4046 - DNA, 26 bp, Homo sapiens
tcatgaacatggaatccatgcaggcc

SEQ ID NO: 4047 - DNA, 26 bp, Homo sapiens
catgaacatggaatccatgcaggcct

SEQ ID NO: 4048 - DNA, 26 bp, Homo sapiens
atgaacatggaatccatgcaggcctt

SEQ ID NO: 4049 - DNA, 26 bp, Homo sapiens
tgaacatggaatccatgcaggccttc

SEQ ID NO: 4050 - DNA, 26 bp, Homo sapiens
gaacatggaatccatgcaggccttca

SEQ ID NO: 4051 - DNA, 26 bp, Homo sapiens
aacatggaatccatgcaggccttcag

SEQ ID NO: 4052 - DNA, 26 bp, Homo sapiens
acatggaatccatgcaggccttcagt

SEQ ID NO: 4053 - DNA, 26 bp, Homo sapiens
catggaatccatgcaggccttcagtc

SEQ ID NO: 4054 - DNA, 26 bp, Homo sapiens
atggaatccatgcaggccttcagtca

SEQ ID NO: 4055 - DNA, 26 bp, Homo sapiens
tggaatccatgcaggccttcagtcag

SEQ ID NO: 4056 - DNA, 26 bp, Homo sapiens
ggaatccatgcaggccttcagtcagt

SEQ ID NO: 4057 - DNA, 26 bp, Homo sapiens
gaatccatgcaggccttcagtcagtc

SEQ ID NO: 4058 - DNA, 26 bp, Homo sapiens
aatccatgcaggccttcagtcagtcc

SEQ ID NO: 4059 - DNA, 26 bp, Homo sapiens
atccatgcaggccttcagtcagtcct

SEQ ID NO: 4060 - DNA, 26 bp, Homo sapiens
tccatgcaggccttcagtcagtcctt

SEQ ID NO: 4061 - DNA, 26 bp, Homo sapiens
ccatgcaggccttcagtcagtccttt

SEQ ID NO: 4062 - DNA, 26 bp, Homo sapiens
catgcaggccttcagtcagtccttta

SEQ ID NO: 4063 - DNA, 26 bp, Homo sapiens
atgcaggccttcagtcagtcctttaa

SEQ ID NO: 4064 - DNA, 26 bp, Homo sapiens
tgcaggccttcagtcagtcctttaat

SEQ ID NO: 4065 - DNA, 26 bp, Homo sapiens
gcaggccttcagtcagtcctttaatg

SEQ ID NO: 4066 - DNA, 26 bp, Homo sapiens
caggccttcagtcagtcctttaatgc

SEQ ID NO: 4067 - DNA, 26 bp, Homo sapiens
aggccttcagtcagtcctttaatgct

SEQ ID NO: 4068 - DNA, 26 bp, Homo sapiens
ggccttcagtcagtcctttaatgctt

SEQ ID NO: 4069 - DNA, 26 bp, Homo sapiens
gccttcagtcagtcctttaatgcttc

SEQ ID NO: 4070 - DNA, 26 bp, Homo sapiens
ccttcagtcagtcctttaatgcttcc

SEQ ID NO: 4071 - DNA, 26 bp, Homo sapiens
cttcagtcagtcctttaatgcttccc

SEQ ID NO: 4072 - DNA, 26 bp, Homo sapiens
ttcagtcagtcctttaatgcttcccc

SEQ ID NO: 4073 - DNA, 26 bp, Homo sapiens
tcagtcagtcctttaatgcttcccca

SEQ ID NO: 4074 - DNA, 26 bp, Homo sapiens
cagtcagtcctttaatgcttccccac

SEQ ID NO: 4075 - DNA, 26 bp, Homo sapiens
agtcagtcctttaatgcttccccaca

SEQ ID NO: 4076 - DNA, 26 bp, Homo sapiens
gtcagtcctttaatgcttccccacac

SEQ ID NO: 4077 - DNA, 26 bp, Homo sapiens
tcagtcctttaatgcttccccacacc

SEQ ID NO: 4078 - DNA, 26 bp, Homo sapiens
cagtcctttaatgcttccccacacct

SEQ ID NO: 4079 - DNA, 26 bp, Homo sapiens
agtcctttaatgcttccccacacctt

SEQ ID NO: 4080 - DNA, 26 bp, Homo sapiens
gtcctttaatgcttccccacaccttc

SEQ ID NO: 4081 - DNA, 26 bp, Homo sapiens
tcctttaatgcttccccacaccttca

SEQ ID NO: 4082 - DNA, 26 bp, Homo sapiens
cctttaatgcttccccacaccttcac

SEQ ID NO: 4083 - DNA, 26 bp, Homo sapiens
ctttaatgcttccccacaccttcact

SEQ ID NO: 4084 - DNA, 26 bp, Homo sapiens
tttaatgcttccccacaccttcactg

SEQ ID NO: 4085 - DNA, 26 bp, Homo sapiens
ttaatgcttccccacaccttcactgg

SEQ ID NO: 4086 - DNA, 26 bp, Homo sapiens
taatgcttccccacaccttcactggt

SEQ ID NO: 4087 - DNA, 26 bp, Homo sapiens
aatgcttccccacaccttcactggtc

SEQ ID NO: 4088 - DNA, 26 bp, Homo sapiens
atgcttccccacaccttcactggtcc

SEQ ID NO: 4089 - DNA, 26 bp, Homo sapiens
tgcttccccacaccttcactggtcca

SEQ ID NO: 4090 - DNA, 26 bp, Homo sapiens
gcttccccacaccttcactggtccat

SEQ ID NO: 4091 - DNA, 26 bp, Homo sapiens
cttccccacaccttcactggtccatt

SEQ ID NO: 4092 - DNA, 26 bp, Homo sapiens
ttccccacaccttcactggtccatta

SEQ ID NO: 4093 - DNA, 26 bp, Homo sapiens
tccccacaccttcactggtccattac

SEQ ID NO: 4094 - DNA, 26 bp, Homo sapiens
ccccacaccttcactggtccattact

SEQ ID NO: 4095 - DNA, 26 bp, Homo sapiens
cccacaccttcactggtccattactt

SEQ ID NO: 4096 - DNA, 26 bp, Homo sapiens
ccacaccttcactggtccattacttt

SEQ ID NO: 4097 - DNA, 26 bp, Homo sapiens
cacaccttcactggtccattactttc

SEQ ID NO: 4098 - DNA, 26 bp, Homo sapiens
acaccttcactggtccattactttcc

SEQ ID NO: 4099 - DNA, 26 bp, Homo sapiens
caccttcactggtccattactttcct

SEQ ID NO: 4100 - DNA, 26 bp, Homo sapiens
accttcactggtccattactttcctt

SEQ ID NO: 4101 - DNA, 26 bp, Homo sapiens
ccttcactggtccattactttccttc

SEQ ID NO: 4102 - DNA, 26 bp, Homo sapiens
cttcactggtccattactttccttct

SEQ ID NO: 4103 - DNA, 26 bp, Homo sapiens
ttcactggtccattactttccttctg

SEQ ID NO: 4104 - DNA, 26 bp, Homo sapiens
tcactggtccattactttccttctgc

SEQ ID NO: 4105 - DNA, 26 bp, Homo sapiens
cactggtccattactttccttctgct

SEQ ID NO: 4106 - DNA, 26 bp, Homo sapiens
actggtccattactttccttctgctc

SEQ ID NO: 4107 - DNA, 26 bp, Homo sapiens
ctggtccattactttccttctgctcg

SEQ ID NO: 4108 - DNA, 26 bp, Homo sapiens
tggtccattactttccttctgctcga

SEQ ID NO: 4109 - DNA, 26 bp, Homo sapiens
ggtccattactttccttctgctcgaa

SEQ ID NO: 4110 - DNA, 26 bp, Homo sapiens
gtccattactttccttctgctcgaaa

SEQ ID NO: 4111 - DNA, 26 bp, Homo sapiens
tccattactttccttctgctcgaaat

SEQ ID NO: 4112 - DNA, 26 bp, Homo sapiens
ccattactttccttctgctcgaaatt

SEQ ID NO: 4113 - DNA, 26 bp, Homo sapiens
cattactttccttctgctcgaaattg

SEQ ID NO: 4114 - DNA, 26 bp, Homo sapiens
attactttccttctgctcgaaattga

SEQ ID NO: 4115 - DNA, 26 bp, Homo sapiens
ttactttccttctgctcgaaattgat

SEQ ID NO: 4116 - DNA, 26 bp, Homo sapiens
tactttccttctgctcgaaattgatg

SEQ ID NO: 4117 - DNA, 26 bp, Homo sapiens
actttccttctgctcgaaattgatga

SEQ ID NO: 4118 - DNA, 26 bp, Homo sapiens
ctttccttctgctcgaaattgatgat

SEQ ID NO: 4119 - DNA, 26 bp, Homo sapiens
tttccttctgctcgaaattgatgatg

SEQ ID NO: 4120 - DNA, 26 bp, Homo sapiens
ttccttctgctcgaaattgatgatgc

SEQ ID NO: 4121 - DNA, 26 bp, Homo sapiens
tccttctgctcgaaattgatgatgcc

SEQ ID NO: 4122 - DNA, 26 bp, Homo sapiens
ccttctgctcgaaattgatgatgccc

SEQ ID NO: 4123 - DNA, 26 bp, Homo sapiens
cttctgctcgaaattgatgatgccct

SEQ ID NO: 4124 - DNA, 26 bp, Homo sapiens
ttctgctcgaaattgatgatgccctg

SEQ ID NO: 4125 - DNA, 26 bp, Homo sapiens
tctgctcgaaattgatgatgccctgc

SEQ ID NO: 4126 - DNA, 26 bp, Homo sapiens
ctgctcgaaattgatgatgccctgca

SEQ ID NO: 4127 - DNA, 26 bp, Homo sapiens
tgctcgaaattgatgatgccctgcac

SEQ ID NO: 4128 - DNA, 26 bp, Homo sapiens
gctcgaaattgatgatgccctgcact

SEQ ID NO: 4129 - DNA, 26 bp, Homo sapiens
ctcgaaattgatgatgccctgcactg

SEQ ID NO: 4130 - DNA, 26 bp, Homo sapiens
tcgaaattgatgatgccctgcactgg

SEQ ID NO: 4131 - DNA, 26 bp, Homo sapiens
cgaaattgatgatgccctgcactggg

SEQ ID NO: 4132 - DNA, 26 bp, Homo sapiens
gaaattgatgatgccctgcactgggc

SEQ ID NO: 4133 - DNA, 26 bp, Homo sapiens
aaattgatgatgccctgcactgggcc

SEQ ID NO: 4134 - DNA, 26 bp, Homo sapiens
aattgatgatgccctgcactgggccg

SEQ ID NO: 4135 - DNA, 26 bp, Homo sapiens
attgatgatgccctgcactgggccgt

SEQ ID NO: 4136 - DNA, 26 bp, Homo sapiens
ttgatgatgccctgcactgggccgtc

SEQ ID NO: 4137 - DNA, 26 bp, Homo sapiens
tgatgatgccctgcactgggccgtcg

SEQ ID NO: 4138 - DNA, 26 bp, Homo sapiens
gatgatgccctgcactgggccgtcgc

SEQ ID NO: 4139 - DNA, 26 bp, Homo sapiens
atgatgccctgcactgggccgtcgcc

SEQ ID NO: 4140 - DNA, 26 bp, Homo sapiens
tgatgccctgcactgggccgtcgccc

SEQ ID NO: 4141 - DNA, 26 bp, Homo sapiens
gatgccctgcactgggccgtcgccct

SEQ ID NO: 4142 - DNA, 26 bp, Homo sapiens
atgccctgcactgggccgtcgccctt

SEQ ID NO: 4143 - DNA, 26 bp, Homo sapiens
tgccctgcactgggccgtcgcccttc

SEQ ID NO: 4144 - DNA, 26 bp, Homo sapiens
gccctgcactgggccgtcgcccttca

SEQ ID NO: 4145 - DNA, 26 bp, Homo sapiens
ccctgcactgggccgtcgcccttcag

SEQ ID NO: 4146 - DNA, 26 bp, Homo sapiens
cctgcactgggccgtcgcccttcagc

SEQ ID NO: 4147 - DNA, 26 bp, Homo sapiens
ctgcactgggccgtcgcccttcagca

SEQ ID NO: 4148 - DNA, 26 bp, Homo sapiens
tgcactgggccgtcgcccttcagcac

SEQ ID NO: 4149 - DNA, 26 bp, Homo sapiens
gcactgggccgtcgcccttcagcacg

SEQ ID NO: 4150 - DNA, 26 bp, Homo sapiens
cactgggccgtcgcccttcagcacgc

SEQ ID NO: 4151 - DNA, 26 bp, Homo sapiens
actgggccgtcgcccttcagcacgca

SEQ ID NO: 4152 - DNA, 26 bp, Homo sapiens
ctgggccgtcgcccttcagcacgcac

SEQ ID NO: 4153 - DNA, 26 bp, Homo sapiens
tgggccgtcgcccttcagcacgcaca

SEQ ID NO: 4154 - DNA, 26 bp, Homo sapiens
gggccgtcgcccttcagcacgcacac

SEQ ID NO: 4155 - DNA, 26 bp, Homo sapiens
ggccgtcgcccttcagcacgcacacg

SEQ ID NO: 4156 - DNA, 26 bp, Homo sapiens
gccgtcgcccttcagcacgcacacgg

SEQ ID NO: 4157 - DNA, 26 bp, Homo sapiens
ccgtcgcccttcagcacgcacacggc

SEQ ID NO: 4158 - DNA, 26 bp, Homo sapiens
cgtcgcccttcagcacgcacacggcc

SEQ ID NO: 4159 - DNA, 26 bp, Homo sapiens
gtcgcccttcagcacgcacacggcct

SEQ ID NO: 4160 - DNA, 26 bp, Homo sapiens
tcgcccttcagcacgcacacggcctt

SEQ ID NO: 4161 - DNA, 26 bp, Homo sapiens
cgcccttcagcacgcacacggccttc

SEQ ID NO: 4162 - DNA, 26 bp, Homo sapiens
gcccttcagcacgcacacggccttcg

SEQ ID NO: 4163 - DNA, 26 bp, Homo sapiens
cccttcagcacgcacacggccttcgt

SEQ ID NO: 4164 - DNA, 26 bp, Homo sapiens
ccttcagcacgcacacggccttcgtc

SEQ ID NO: 4165 - DNA, 26 bp, Homo sapiens
cttcagcacgcacacggccttcgtcg

SEQ ID NO: 4166 - DNA, 26 bp, Homo sapiens
ttcagcacgcacacggccttcgtcgc

SEQ ID NO: 4167 - DNA, 26 bp, Homo sapiens
tcagcacgcacacggccttcgtcgcc

SEQ ID NO: 4168 - DNA, 26 bp, Homo sapiens
cagcacgcacacggccttcgtcgcca

SEQ ID NO: 4169 - DNA, 26 bp, Homo sapiens
agcacgcacacggccttcgtcgccat

SEQ ID NO: 4170 - DNA, 26 bp, Homo sapiens
gcacgcacacggccttcgtcgccata

SEQ ID NO: 4171 - DNA, 26 bp, Homo sapiens
cacgcacacggccttcgtcgccataa

SEQ ID NO: 4172 - DNA, 26 bp, Homo sapiens
acgcacacggccttcgtcgccataac

SEQ ID NO: 4173 - DNA, 26 bp, Homo sapiens
cgcacacggccttcgtcgccataact

SEQ ID NO: 4174 - DNA, 26 bp, Homo sapiens
gcacacggccttcgtcgccataactc

SEQ ID NO: 4175 - DNA, 26 bp, Homo sapiens
cacacggccttcgtcgccataactcg

SEQ ID NO: 4176 - DNA, 26 bp, Homo sapiens
acacggccttcgtcgccataactcgc

SEQ ID NO: 4177 - DNA, 26 bp, Homo sapiens
cacggccttcgtcgccataactcgct

SEQ ID NO: 4178 - DNA, 26 bp, Homo sapiens
acggccttcgtcgccataactcgcta

SEQ ID NO: 4179 - DNA, 26 bp, Homo sapiens
cggccttcgtcgccataactcgctag

SEQ ID NO: 4180 - DNA, 26 bp, Homo sapiens
ggccttcgtcgccataactcgctagg

SEQ ID NO: 4181 - DNA, 26 bp, Homo sapiens
gccttcgtcgccataactcgctaggc

SEQ ID NO: 4182 - DNA, 26 bp, Homo sapiens
ccttcgtcgccataactcgctaggcc

SEQ ID NO: 4183 - DNA, 26 bp, Homo sapiens
cttcgtcgccataactcgctaggcca

SEQ ID NO: 4184 - DNA, 26 bp, Homo sapiens
ttcgtcgccataactcgctaggccac

SEQ ID NO: 4185 - DNA, 26 bp, Homo sapiens
tcgtcgccataactcgctaggccacg

SEQ ID NO: 4186 - DNA, 26 bp, Homo sapiens
cgtcgccataactcgctaggccacgc

SEQ ID NO: 4187 - DNA, 26 bp, Homo sapiens
gtcgccataactcgctaggccacgcc

SEQ ID NO: 4188 - DNA, 26 bp, Homo sapiens
tcgccataactcgctaggccacgccg

SEQ ID NO: 4189 - DNA, 26 bp, Homo sapiens
cgccataactcgctaggccacgccga

SEQ ID NO: 4190 - DNA, 26 bp, Homo sapiens
gccataactcgctaggccacgccgag

SEQ ID NO: 4191 - DNA, 26 bp, Homo sapiens
ccataactcgctaggccacgccgagg

SEQ ID NO: 4192 - DNA, 26 bp, Homo sapiens
cataactcgctaggccacgccgaggt

SEQ ID NO: 4193 - DNA, 26 bp, Homo sapiens
ataactcgctaggccacgccgaggtc

SEQ ID NO: 4194 - DNA, 26 bp, Homo sapiens
taactcgctaggccacgccgaggtcc

SEQ ID NO: 4195 - DNA, 26 bp, Homo sapiens
aactcgctaggccacgccgaggtcct

SEQ ID NO: 4196 - DNA, 26 bp, Homo sapiens
actcgctaggccacgccgaggtcctg

SEQ ID NO: 4197 - DNA, 26 bp, Homo sapiens
ctcgctaggccacgccgaggtcctgg

SEQ ID NO: 4198 - DNA, 26 bp, Homo sapiens
tcgctaggccacgccgaggtcctggt

SEQ ID NO: 4199 - DNA, 26 bp, Homo sapiens
cgctaggccacgccgaggtcctggtt

SEQ ID NO: 4200 - DNA, 26 bp, Homo sapiens
gctaggccacgccgaggtcctggttc

SEQ ID NO: 4201 - DNA, 26 bp, Homo sapiens
ctaggccacgccgaggtcctggttcc

SEQ ID NO: 4202 - DNA, 26 bp, Homo sapiens
taggccacgccgaggtcctggttccg

SEQ ID NO: 4203 - DNA, 26 bp, Homo sapiens
aggccacgccgaggtcctggttccga

SEQ ID NO: 4204 - DNA, 26 bp, Homo sapiens
ggccacgccgaggtcctggttccgag

SEQ ID NO: 4205 - DNA, 26 bp, Homo sapiens
gccacgccgaggtcctggttccgagg

SEQ ID NO: 4206 - DNA, 26 bp, Homo sapiens
ccacgccgaggtcctggttccgagga

SEQ ID NO: 4207 - DNA, 26 bp, Homo sapiens
cacgccgaggtcctggttccgaggac

SEQ ID NO: 4208 - DNA, 26 bp, Homo sapiens
acgccgaggtcctggttccgaggact

SEQ ID NO: 4209 - DNA, 26 bp, Homo sapiens
cgccgaggtcctggttccgaggactg

SEQ ID NO: 4210 - DNA, 26 bp, Homo sapiens
gccgaggtcctggttccgaggactgc

SEQ ID NO: 4211 - DNA, 26 bp, Homo sapiens
ccgaggtcctggttccgaggactgca

SEQ ID NO: 4212 - DNA, 26 bp, Homo sapiens
cgaggtcctggttccgaggactgcaa

SEQ ID NO: 4213 - DNA, 26 bp, Homo sapiens
gaggtcctggttccgaggactgcaac

SEQ ID NO: 4214 - DNA, 26 bp, Homo sapiens
aggtcctggttccgaggactgcaacg

SEQ ID NO: 4215 - DNA, 26 bp, Homo sapiens
ggtcctggttccgaggactgcaacgg

SEQ ID NO: 4216 - DNA, 26 bp, Homo sapiens
gtcctggttccgaggactgcaacgga

SEQ ID NO: 4217 - DNA, 26 bp, Homo sapiens
tcctggttccgaggactgcaacggaa

SEQ ID NO: 4218 - DNA, 26 bp, Homo sapiens
cctggttccgaggactgcaacggaaa

SEQ ID NO: 4219 - DNA, 26 bp, Homo sapiens
ctggttccgaggactgcaacggaaac

SEQ ID NO: 4220 - DNA, 26 bp, Homo sapiens
tggttccgaggactgcaacggaaacc

SEQ ID NO: 4221 - DNA, 26 bp, Homo sapiens
ggttccgaggactgcaacggaaaccc

SEQ ID NO: 4222 - DNA, 26 bp, Homo sapiens
gttccgaggactgcaacggaaacccc

SEQ ID NO: 4223 - DNA, 26 bp, Homo sapiens
ttccgaggactgcaacggaaacccca

SEQ ID NO: 4224 - DNA, 26 bp, Homo sapiens
tccgaggactgcaacggaaaccccag

SEQ ID NO: 4225 - DNA, 26 bp, Homo sapiens
ccgaggactgcaacggaaaccccaga

SEQ ID NO: 4226 - DNA, 26 bp, Homo sapiens
cgaggactgcaacggaaaccccagac

SEQ ID NO: 4227 - DNA, 26 bp, Homo sapiens
gaggactgcaacggaaaccccagacg

SEQ ID NO: 4228 - DNA, 26 bp, Homo sapiens
aggactgcaacggaaaccccagacgc

SEQ ID NO: 4229 - DNA, 26 bp, Homo sapiens
ggactgcaacggaaaccccagacgct

SEQ ID NO: 4230 - DNA, 26 bp, Homo sapiens
gactgcaacggaaaccccagacgctg

SEQ ID NO: 4231 - DNA, 26 bp, Homo sapiens
actgcaacggaaaccccagacgctgc

SEQ ID NO: 4232 - DNA, 26 bp, Homo sapiens
ctgcaacggaaaccccagacgctgca

SEQ ID NO: 4233 - DNA, 26 bp, Homo sapiens
tgcaacggaaaccccagacgctgcag

SEQ ID NO: 4234 - DNA, 26 bp, Homo sapiens
gcaacggaaaccccagacgctgcagg

SEQ ID NO: 4235 - DNA, 26 bp, Homo sapiens
caacggaaaccccagacgctgcagga

SEQ ID NO: 4236 - DNA, 26 bp, Homo sapiens
aacggaaaccccagacgctgcaggag

SEQ ID NO: 4237 - DNA, 26 bp, Homo sapiens
acggaaaccccagacgctgcaggaga

SEQ ID NO: 4238 - DNA, 26 bp, Homo sapiens
cggaaaccccagacgctgcaggagac

SEQ ID NO: 4239 - DNA, 26 bp, Homo sapiens
ggaaaccccagacgctgcaggagact

SEQ ID NO: 4240 - DNA, 26 bp, Homo sapiens
gaaaccccagacgctgcaggagacta

SEQ ID NO: 4241 - DNA, 26 bp, Homo sapiens
aaaccccagacgctgcaggagactac

SEQ ID NO: 4242 - DNA, 26 bp, Homo sapiens
aaccccagacgctgcaggagactacg

SEQ ID NO: 4243 - DNA, 26 bp, Homo sapiens
accccagacgctgcaggagactacga

SEQ ID NO: 4244 - DNA, 26 bp, Homo sapiens
ccccagacgctgcaggagactacgac

SEQ ID NO: 4245 - DNA, 26 bp, Homo sapiens
cccagacgctgcaggagactacgacg

SEQ ID NO: 4246 - DNA, 26 bp, Homo sapiens
ccagacgctgcaggagactacgacgc

SEQ ID NO: 4247 - DNA, 26 bp, Homo sapiens
cagacgctgcaggagactacgacgca

SEQ ID NO: 4248 - DNA, 26 bp, Homo sapiens
agacgctgcaggagactacgacgcaa

SEQ ID NO: 4249 - DNA, 26 bp, Homo sapiens
gacgctgcaggagactacgacgcaaa

SEQ ID NO: 4250 - DNA, 26 bp, Homo sapiens
acgctgcaggagactacgacgcaaac

SEQ ID NO: 4251 - DNA, 26 bp, Homo sapiens
cgctgcaggagactacgacgcaaacc

SEQ ID NO: 4252 - DNA, 26 bp, Homo sapiens
gctgcaggagactacgacgcaaacca

SEQ ID NO: 4253 - DNA, 26 bp, Homo sapiens
ctgcaggagactacgacgcaaaccag

SEQ ID NO: 4254 - DNA, 26 bp, Homo sapiens
tgcaggagactacgacgcaaaccagc

SEQ ID NO: 4255 - DNA, 26 bp, Homo sapiens
gcaggagactacgacgcaaaccagca

SEQ ID NO: 4256 - DNA, 26 bp, Homo sapiens
caggagactacgacgcaaaccagcac

SEQ ID NO: 4257 - DNA, 26 bp, Homo sapiens
aggagactacgacgcaaaccagcacc

SEQ ID NO: 4258 - DNA, 26 bp, Homo sapiens
ggagactacgacgcaaaccagcaccc

SEQ ID NO: 4259 - DNA, 26 bp, Homo sapiens
gagactacgacgcaaaccagcacccc

SEQ ID NO: 4260 - DNA, 26 bp, Homo sapiens
agactacgacgcaaaccagcaccccg

SEQ ID NO: 4261 - DNA, 26 bp, Homo sapiens
gactacgacgcaaaccagcaccccgt

SEQ ID NO: 4262 - DNA, 26 bp, Homo sapiens
actacgacgcaaaccagcaccccgtc

SEQ ID NO: 4263 - DNA, 26 bp, Homo sapiens
ctacgacgcaaaccagcaccccgtct

SEQ ID NO: 4264 - DNA, 26 bp, Homo sapiens
tacgacgcaaaccagcaccccgtctc

SEQ ID NO: 4265 - DNA, 26 bp, Homo sapiens
acgacgcaaaccagcaccccgtctcc

SEQ ID NO: 4266 - DNA, 26 bp, Homo sapiens
cgacgcaaaccagcaccccgtctccg

SEQ ID NO: 4267 - DNA, 26 bp, Homo sapiens
gacgcaaaccagcaccccgtctccgc

SEQ ID NO: 4268 - DNA, 26 bp, Homo sapiens
acgcaaaccagcaccccgtctccgcg

SEQ ID NO: 4269 - DNA, 26 bp, Homo sapiens
cgcaaaccagcaccccgtctccgcga

SEQ ID NO: 4270 - DNA, 26 bp, Homo sapiens
gcaaaccagcaccccgtctccgcgac

SEQ ID NO: 4271 - DNA, 26 bp, Homo sapiens
caaaccagcaccccgtctccgcgact

SEQ ID NO: 4272 - DNA, 26 bp, Homo sapiens
aaaccagcaccccgtctccgcgacta

SEQ ID NO: 4273 - DNA, 26 bp, Homo sapiens
aaccagcaccccgtctccgcgactac

SEQ ID NO: 4274 - DNA, 26 bp, Homo sapiens
accagcaccccgtctccgcgactact

SEQ ID NO: 4275 - DNA, 26 bp, Homo sapiens
ccagcaccccgtctccgcgactactt

SEQ ID NO: 4276 - DNA, 26 bp, Homo sapiens
cagcaccccgtctccgcgactacttt

SEQ ID NO: 4277 - DNA, 26 bp, Homo sapiens
agcaccccgtctccgcgactacttta

SEQ ID NO: 4278 - DNA, 26 bp, Homo sapiens
gcaccccgtctccgcgactactttat

SEQ ID NO: 4279 - DNA, 26 bp, Homo sapiens
caccccgtctccgcgactactttata

SEQ ID NO: 4280 - DNA, 26 bp, Homo sapiens
accccgtctccgcgactactttatag

SEQ ID NO: 4281 - DNA, 26 bp, Homo sapiens
ccccgtctccgcgactactttatagg

SEQ ID NO: 4282 - DNA, 26 bp, Homo sapiens
cccgtctccgcgactactttataggc

SEQ ID NO: 4283 - DNA, 26 bp, Homo sapiens
ccgtctccgcgactactttataggcc

SEQ ID NO: 4284 - DNA, 26 bp, Homo sapiens
cgtctccgcgactactttataggcca

SEQ ID NO: 4285 - DNA, 26 bp, Homo sapiens
gtctccgcgactactttataggccag

SEQ ID NO: 4286 - DNA, 26 bp, Homo sapiens
tctccgcgactactttataggccaga

SEQ ID NO: 4287 - DNA, 26 bp, Homo sapiens
ctccgcgactactttataggccagac

SEQ ID NO: 4288 - DNA, 26 bp, Homo sapiens
tccgcgactactttataggccagacc

SEQ ID NO: 4289 - DNA, 26 bp, Homo sapiens
ccgcgactactttataggccagacct

SEQ ID NO: 4290 - DNA, 26 bp, Homo sapiens
cgcgactactttataggccagacctc

SEQ ID NO: 4291 - DNA, 26 bp, Homo sapiens
gcgactactttataggccagacctcc

SEQ ID NO: 4292 - DNA, 26 bp, Homo sapiens
cgactactttataggccagacctccg

SEQ ID NO: 4293 - DNA, 26 bp, Homo sapiens
gactactttataggccagacctccgc

SEQ ID NO: 4294 - DNA, 26 bp, Homo sapiens
actactttataggccagacctccgcg

SEQ ID NO: 4295 - DNA, 26 bp, Homo sapiens
ctactttataggccagacctccgcgc

SEQ ID NO: 4296 - DNA, 26 bp, Homo sapiens
tactttataggccagacctccgcgcc

SEQ ID NO: 4297 - DNA, 26 bp, Homo sapiens
actttataggccagacctccgcgcct

SEQ ID NO: 4298 - DNA, 26 bp, Homo sapiens
ctttataggccagacctccgcgcctc

SEQ ID NO: 4299 - DNA, 26 bp, Homo sapiens
tttataggccagacctccgcgcctcg

SEQ ID NO: 4300 - DNA, 26 bp, Homo sapiens
ttataggccagacctccgcgcctcgc

SEQ ID NO: 4301 - DNA, 26 bp, Homo sapiens
tataggccagacctccgcgcctcgcc

SEQ ID NO: 4302 - DNA, 26 bp, Homo sapiens
ataggccagacctccgcgcctcgccc

SEQ ID NO: 4303 - DNA, 26 bp, Homo sapiens
taggccagacctccgcgcctcgccca

SEQ ID NO: 4304 - DNA, 26 bp, Homo sapiens
aggccagacctccgcgcctcgcccac

SEQ ID NO: 4305 - DNA, 26 bp, Homo sapiens
ggccagacctccgcgcctcgcccact

SEQ ID NO: 4306 - DNA, 26 bp, Homo sapiens
gccagacctccgcgcctcgcccactc

SEQ ID NO: 4307 - DNA, 26 bp, Homo sapiens
ccagacctccgcgcctcgcccactct

SEQ ID NO: 4308 - DNA, 26 bp, Homo sapiens
cagacctccgcgcctcgcccactctg

SEQ ID NO: 4309 - DNA, 26 bp, Homo sapiens
agacctccgcgcctcgcccactctgg

SEQ ID NO: 4310 - DNA, 26 bp, Homo sapiens
gacctccgcgcctcgcccactctggc

SEQ ID NO: 4311 - DNA, 26 bp, Homo sapiens
acctccgcgcctcgcccactctggcc

SEQ ID NO: 4312 - DNA, 26 bp, Homo sapiens
cctccgcgcctcgcccactctggccc

SEQ ID NO: 4313 - DNA, 26 bp, Homo sapiens
ctccgcgcctcgcccactctggcccc

SEQ ID NO: 4314 - DNA, 26 bp, Homo sapiens
tccgcgcctcgcccactctggcccca

SEQ ID NO: 4315 - DNA, 26 bp, Homo sapiens
ccgcgcctcgcccactctggccccaa

SEQ ID NO: 4316 - DNA, 26 bp, Homo sapiens
cgcgcctcgcccactctggccccaaa

SEQ ID NO: 4317 - DNA, 26 bp, Homo sapiens
gcgcctcgcccactctggccccaaac

SEQ ID NO: 4318 - DNA, 26 bp, Homo sapiens
tgagttactctgatgtttattttaat

SEQ ID NO: 4319 - DNA, 26 bp, Homo sapiens
gagttactctgatgtttattttaatg

SEQ ID NO: 4320 - DNA, 26 bp, Homo sapiens
agttactctgatgtttattttaatgc

SEQ ID NO: 4321 - DNA, 26 bp, Homo sapiens
gttactctgatgtttattttaatgca

SEQ ID NO: 4322 - DNA, 26 bp, Homo sapiens
ttactctgatgtttattttaatgcat

SEQ ID NO: 4323 - DNA, 26 bp, Homo sapiens
tactctgatgtttattttaatgcatc

SEQ ID NO: 4324 - DNA, 26 bp, Homo sapiens
actctgatgtttattttaatgcatct

SEQ ID NO: 4325 - DNA, 26 bp, Homo sapiens
ctctgatgtttattttaatgcatctt

SEQ ID NO: 4326 - DNA, 26 bp, Homo sapiens
tctgatgtttattttaatgcatctta

SEQ ID NO: 4327 - DNA, 26 bp, Homo sapiens
ctgatgtttattttaatgcatcttag

SEQ ID NO: 4328 - DNA, 26 bp, Homo sapiens
tgatgtttattttaatgcatcttagt

SEQ ID NO: 4329 - DNA, 26 bp, Homo sapiens
gatgtttattttaatgcatcttagtc

SEQ ID NO: 4330 - DNA, 26 bp, Homo sapiens
atgtttattttaatgcatcttagtcc

SEQ ID NO: 4331 - DNA, 26 bp, Homo sapiens
tgtttattttaatgcatcttagtcca

SEQ ID NO: 4332 - DNA, 26 bp, Homo sapiens
gtttattttaatgcatcttagtccac

SEQ ID NO: 4333 - DNA, 26 bp, Homo sapiens
tttattttaatgcatcttagtccaca

SEQ ID NO: 4334 - DNA, 26 bp, Homo sapiens
ttattttaatgcatcttagtccacac

SEQ ID NO: 4335 - DNA, 26 bp, Homo sapiens
tattttaatgcatcttagtccacaca

SEQ ID NO: 4336 - DNA, 26 bp, Homo sapiens
attttaatgcatcttagtccacacag

SEQ ID NO: 4337 - DNA, 26 bp, Homo sapiens
ttttaatgcatcttagtccacacagt

SEQ ID NO: 4338 - DNA, 26 bp, Homo sapiens
tttaatgcatcttagtccacacagtt

SEQ ID NO: 4339 - DNA, 26 bp, Homo sapiens
ttaatgcatcttagtccacacagttg

SEQ ID NO: 4340 - DNA, 26 bp, Homo sapiens
taatgcatcttagtccacacagttgg

SEQ ID NO: 4341 - DNA, 26 bp, Homo sapiens
aatgcatcttagtccacacagttggt

SEQ ID NO: 4342 - DNA, 26 bp, Homo sapiens
atgcatcttagtccacacagttggta

SEQ ID NO: 4343 - DNA, 26 bp, Homo sapiens
tgcatcttagtccacacagttggtat

SEQ ID NO: 4344 - DNA, 26 bp, Homo sapiens
gcatcttagtccacacagttggtata

SEQ ID NO: 4345 - DNA, 26 bp, Homo sapiens
catcttagtccacacagttggtataa

SEQ ID NO: 4346 - DNA, 26 bp, Homo sapiens
atcttagtccacacagttggtataaa

SEQ ID NO: 4347 - DNA, 26 bp, Homo sapiens
tcttagtccacacagttggtataaaa

SEQ ID NO: 4348 - DNA, 26 bp, Homo sapiens
cttagtccacacagttggtataaaat

SEQ ID NO: 4349 - DNA, 26 bp, Homo sapiens
ttagtccacacagttggtataaaatc

SEQ ID NO: 4350 - DNA, 26 bp, Homo sapiens
tagtccacacagttggtataaaatca

SEQ ID NO: 4351 - DNA, 26 bp, Homo sapiens
agtccacacagttggtataaaatcag

SEQ ID NO: 4352 - DNA, 26 bp, Homo sapiens
gtccacacagttggtataaaatcaga

SEQ ID NO: 4353 - DNA, 26 bp, Homo sapiens
tccacacagttggtataaaatcagaa

SEQ ID NO: 4354 - DNA, 26 bp, Homo sapiens
ccacacagttggtataaaatcagaaa

SEQ ID NO: 4355 - DNA, 26 bp, Homo sapiens
cacacagttggtataaaatcagaaaa

SEQ ID NO: 4356 - DNA, 26 bp, Homo sapiens
acacagttggtataaaatcagaaaat

SEQ ID NO: 4357 - DNA, 26 bp, Homo sapiens
cacagttggtataaaatcagaaaatg

SEQ ID NO: 4358 - DNA, 26 bp, Homo sapiens
acagttggtataaaatcagaaaatgc

SEQ ID NO: 4359 - DNA, 26 bp, Homo sapiens
cagttggtataaaatcagaaaatgca

SEQ ID NO: 4360 - DNA, 26 bp, Homo sapiens
agttggtataaaatcagaaaatgcaa

SEQ ID NO: 4361 - DNA, 26 bp, Homo sapiens
gttggtataaaatcagaaaatgcaaa

SEQ ID NO: 4362 - DNA, 26 bp, Homo sapiens
ttggtataaaatcagaaaatgcaaag

SEQ ID NO: 4363 - DNA, 26 bp, Homo sapiens
tggtataaaatcagaaaatgcaaagc

SEQ ID NO: 4364 - DNA, 26 bp, Homo sapiens
ggtataaaatcagaaaatgcaaagca

SEQ ID NO: 4365 - DNA, 26 bp, Homo sapiens
gtataaaatcagaaaatgcaaagcaa

SEQ ID NO: 4366 - DNA, 26 bp, Homo sapiens
tataaaatcagaaaatgcaaagcaaa

SEQ ID NO: 4367 - DNA, 26 bp, Homo sapiens
ataaaatcagaaaatgcaaagcaaaa

SEQ ID NO: 4368 - DNA, 26 bp, Homo sapiens
taaaatcagaaaatgcaaagcaaaaa

SEQ ID NO: 4369 - DNA, 26 bp, Homo sapiens
aaaatcagaaaatgcaaagcaaaaac

SEQ ID NO: 4370 - DNA, 26 bp, Homo sapiens
aaatcagaaaatgcaaagcaaaaaca

SEQ ID NO: 4371 - DNA, 26 bp, Homo sapiens
aatcagaaaatgcaaagcaaaaacaa

SEQ ID NO: 4372 - DNA, 26 bp, Homo sapiens
atcagaaaatgcaaagcaaaaacaaa

SEQ ID NO: 4373 - DNA, 26 bp, Homo sapiens
tcagaaaatgcaaagcaaaaacaaaa

SEQ ID NO: 4374 - DNA, 26 bp, Homo sapiens
cagaaaatgcaaagcaaaaacaaaag

SEQ ID NO: 4375 - DNA, 26 bp, Homo sapiens
agaaaatgcaaagcaaaaacaaaagg

SEQ ID NO: 4376 - DNA, 26 bp, Homo sapiens
gaaaatgcaaagcaaaaacaaaaggt

SEQ ID NO: 4377 - DNA, 26 bp, Homo sapiens
aaaatgcaaagcaaaaacaaaaggtc

SEQ ID NO: 4378 - DNA, 26 bp, Homo sapiens
aaatgcaaagcaaaaacaaaaggtct

SEQ ID NO: 4379 - DNA, 26 bp, Homo sapiens
aatgcaaagcaaaaacaaaaggtctg

SEQ ID NO: 4380 - DNA, 26 bp, Homo sapiens
atgcaaagcaaaaacaaaaggtctgg

SEQ ID NO: 4381 - DNA, 26 bp, Homo sapiens
tgcaaagcaaaaacaaaaggtctgga

SEQ ID NO: 4382 - DNA, 26 bp, Homo sapiens
gcaaagcaaaaacaaaaggtctggag

SEQ ID NO: 4383 - DNA, 26 bp, Homo sapiens
caaagcaaaaacaaaaggtctggagt

SEQ ID NO: 4384 - DNA, 26 bp, Homo sapiens
aaagcaaaaacaaaaggtctggagtc

SEQ ID NO: 4385 - DNA, 26 bp, Homo sapiens
aagcaaaaacaaaaggtctggagtct

SEQ ID NO: 4386 - DNA, 26 bp, Homo sapiens
agcaaaaacaaaaggtctggagtctt

SEQ ID NO: 4387 - DNA, 26 bp, Homo sapiens
gcaaaaacaaaaggtctggagtctta

SEQ ID NO: 4388 - DNA, 26 bp, Homo sapiens
caaaaacaaaaggtctggagtcttag

SEQ ID NO: 4389 - DNA, 26 bp, Homo sapiens
aaaaacaaaaggtctggagtcttagc

SEQ ID NO: 4390 - DNA, 26 bp, Homo sapiens
aaaacaaaaggtctggagtcttagca

SEQ ID NO: 4391 - DNA, 26 bp, Homo sapiens
aaacaaaaggtctggagtcttagcat

SEQ ID NO: 4392 - DNA, 26 bp, Homo sapiens
aacaaaaggtctggagtcttagcatc

SEQ ID NO: 4393 - DNA, 26 bp, Homo sapiens
acaaaaggtctggagtcttagcatca

SEQ ID NO: 4394 - DNA, 26 bp, Homo sapiens
caaaaggtctggagtcttagcatcag

SEQ ID NO: 4395 - DNA, 26 bp, Homo sapiens
aaaaggtctggagtcttagcatcaga

SEQ ID NO: 4396 - DNA, 26 bp, Homo sapiens
aaaggtctggagtcttagcatcagaa

SEQ ID NO: 4397 - DNA, 26 bp, Homo sapiens
aaggtctggagtcttagcatcagaag

SEQ ID NO: 4398 - DNA, 26 bp, Homo sapiens
aggtctggagtcttagcatcagaagg

SEQ ID NO: 4399 - DNA, 26 bp, Homo sapiens
ggtctggagtcttagcatcagaaggg

SEQ ID NO: 4400 - DNA, 26 bp, Homo sapiens
gtctggagtcttagcatcagaagggc

SEQ ID NO: 4401 - DNA, 26 bp, Homo sapiens
tctggagtcttagcatcagaagggca

SEQ ID NO: 4402 - DNA, 26 bp, Homo sapiens
ctggagtcttagcatcagaagggcac

SEQ ID NO: 4403 - DNA, 26 bp, Homo sapiens
tggagtcttagcatcagaagggcacc

SEQ ID NO: 4404 - DNA, 26 bp, Homo sapiens
ggagtcttagcatcagaagggcacca

SEQ ID NO: 4405 - DNA, 26 bp, Homo sapiens
gagtcttagcatcagaagggcaccat

SEQ ID NO: 4406 - DNA, 26 bp, Homo sapiens
agtcttagcatcagaagggcaccata

SEQ ID NO: 4407 - DNA, 26 bp, Homo sapiens
gtcttagcatcagaagggcaccatat

SEQ ID NO: 4408 - DNA, 26 bp, Homo sapiens
tcttagcatcagaagggcaccatata

SEQ ID NO: 4409 - DNA, 26 bp, Homo sapiens
cttagcatcagaagggcaccatatat

SEQ ID NO: 4410 - DNA, 26 bp, Homo sapiens
ttagcatcagaagggcaccatatata

SEQ ID NO: 4411 - DNA, 26 bp, Homo sapiens
tagcatcagaagggcaccatatatac

SEQ ID NO: 4412 - DNA, 26 bp, Homo sapiens
agcatcagaagggcaccatatataca

SEQ ID NO: 4413 - DNA, 26 bp, Homo sapiens
gcatcagaagggcaccatatatacat

SEQ ID NO: 4414 - DNA, 26 bp, Homo sapiens
catcagaagggcaccatatatacatc

SEQ ID NO: 4415 - DNA, 26 bp, Homo sapiens
atcagaagggcaccatatatacatct

SEQ ID NO: 4416 - DNA, 26 bp, Homo sapiens
tcagaagggcaccatatatacatcta

SEQ ID NO: 4417 - DNA, 26 bp, Homo sapiens
cagaagggcaccatatatacatctac

SEQ ID NO: 4418 - DNA, 26 bp, Homo sapiens
agaagggcaccatatatacatctaca

SEQ ID NO: 4419 - DNA, 26 bp, Homo sapiens
gaagggcaccatatatacatctacag

SEQ ID NO: 4420 - DNA, 26 bp, Homo sapiens
aagggcaccatatatacatctacagt

SEQ ID NO: 4421 - DNA, 26 bp, Homo sapiens
agggcaccatatatacatctacagtt

SEQ ID NO: 4422 - DNA, 26 bp, Homo sapiens
gggcaccatatatacatctacagttg

SEQ ID NO: 4423 - DNA, 26 bp, Homo sapiens
ggcaccatatatacatctacagttgg

SEQ ID NO: 4424 - DNA, 26 bp, Homo sapiens
gcaccatatatacatctacagttggt

SEQ ID NO: 4425 - DNA, 26 bp, Homo sapiens
caccatatatacatctacagttggtg

SEQ ID NO: 4426 - DNA, 26 bp, Homo sapiens
accatatatacatctacagttggtgg

SEQ ID NO: 4427 - DNA, 26 bp, Homo sapiens
ccatatatacatctacagttggtggc

SEQ ID NO: 4428 - DNA, 26 bp, Homo sapiens
catatatacatctacagttggtggcc

SEQ ID NO: 4429 - DNA, 26 bp, Homo sapiens
atatatacatctacagttggtggcca

SEQ ID NO: 4430 - DNA, 26 bp, Homo sapiens
tatatacatctacagttggtggccaa

SEQ ID NO: 4431 - DNA, 26 bp, Homo sapiens
atatacatctacagttggtggccaat

SEQ ID NO: 4432 - DNA, 26 bp, Homo sapiens
tatacatctacagttggtggccaata

SEQ ID NO: 4433 - DNA, 26 bp, Homo sapiens
atacatctacagttggtggccaatac

SEQ ID NO: 4434 - DNA, 26 bp, Homo sapiens
tacatctacagttggtggccaataca

SEQ ID NO: 4435 - DNA, 26 bp, Homo sapiens
acatctacagttggtggccaatacaa

SEQ ID NO: 4436 - DNA, 26 bp, Homo sapiens
catctacagttggtggccaatacaag

SEQ ID NO: 4437 - DNA, 26 bp, Homo sapiens
atctacagttggtggccaatacaagt

SEQ ID NO: 4438 - DNA, 26 bp, Homo sapiens
tctacagttggtggccaatacaagtc

SEQ ID NO: 4439 - DNA, 26 bp, Homo sapiens
ctacagttggtggccaatacaagtca

SEQ ID NO: 4440 - DNA, 26 bp, Homo sapiens
tacagttggtggccaatacaagtcat

SEQ ID NO: 4441 - DNA, 26 bp, Homo sapiens
acagttggtggccaatacaagtcatt

SEQ ID NO: 4442 - DNA, 26 bp, Homo sapiens
cagttggtggccaatacaagtcattg

SEQ ID NO: 4443 - DNA, 26 bp, Homo sapiens
agttggtggccaatacaagtcattgc

SEQ ID NO: 4444 - DNA, 26 bp, Homo sapiens
gttggtggccaatacaagtcattgcc

SEQ ID NO: 4445 - DNA, 26 bp, Homo sapiens
ttggtggccaatacaagtcattgcca

SEQ ID NO: 4446 - DNA, 26 bp, Homo sapiens
tggtggccaatacaagtcattgccag

SEQ ID NO: 4447 - DNA, 26 bp, Homo sapiens
ggtggccaatacaagtcattgccaga

SEQ ID NO: 4448 - DNA, 26 bp, Homo sapiens
gtggccaatacaagtcattgccagac

SEQ ID NO: 4449 - DNA, 26 bp, Homo sapiens
tggccaatacaagtcattgccagaca

SEQ ID NO: 4450 - DNA, 26 bp, Homo sapiens
ggccaatacaagtcattgccagacag

SEQ ID NO: 4451 - DNA, 26 bp, Homo sapiens
gccaatacaagtcattgccagacagt

SEQ ID NO: 4452 - DNA, 26 bp, Homo sapiens
ccaatacaagtcattgccagacagtc

SEQ ID NO: 4453 - DNA, 26 bp, Homo sapiens
caatacaagtcattgccagacagtcc

SEQ ID NO: 4454 - DNA, 26 bp, Homo sapiens
aatacaagtcattgccagacagtcct

SEQ ID NO: 4455 - DNA, 26 bp, Homo sapiens
atacaagtcattgccagacagtcctt

SEQ ID NO: 4456 - DNA, 26 bp, Homo sapiens
tacaagtcattgccagacagtccttg

SEQ ID NO: 4457 - DNA, 26 bp, Homo sapiens
acaagtcattgccagacagtccttgg

SEQ ID NO: 4458 - DNA, 26 bp, Homo sapiens
caagtcattgccagacagtccttgga

SEQ ID NO: 4459 - DNA, 26 bp, Homo sapiens
aagtcattgccagacagtccttggag

SEQ ID NO: 4460 - DNA, 26 bp, Homo sapiens
agtcattgccagacagtccttggagg

SEQ ID NO: 4461 - DNA, 26 bp, Homo sapiens
gtcattgccagacagtccttggaggc

SEQ ID NO: 4462 - DNA, 26 bp, Homo sapiens
tcattgccagacagtccttggaggca

SEQ ID NO: 4463 - DNA, 26 bp, Homo sapiens
cattgccagacagtccttggaggcac

SEQ ID NO: 4464 - DNA, 26 bp, Homo sapiens
attgccagacagtccttggaggcaca

SEQ ID NO: 4465 - DNA, 26 bp, Homo sapiens
ttgccagacagtccttggaggcacag

SEQ ID NO: 4466 - DNA, 26 bp, Homo sapiens
tgccagacagtccttggaggcacaga

SEQ ID NO: 4467 - DNA, 26 bp, Homo sapiens
gccagacagtccttggaggcacagaa

SEQ ID NO: 4468 - DNA, 26 bp, Homo sapiens
ccagacagtccttggaggcacagaac

SEQ ID NO: 4469 - DNA, 26 bp, Homo sapiens
cagacagtccttggaggcacagaaca

SEQ ID NO: 4470 - DNA, 26 bp, Homo sapiens
agacagtccttggaggcacagaacag

SEQ ID NO: 4471 - DNA, 26 bp, Homo sapiens
gacagtccttggaggcacagaacagc

SEQ ID NO: 4472 - DNA, 26 bp, Homo sapiens
acagtccttggaggcacagaacagcc

SEQ ID NO: 4473 - DNA, 26 bp, Homo sapiens
cagtccttggaggcacagaacagcct

SEQ ID NO: 4474 - DNA, 26 bp, Homo sapiens
agtccttggaggcacagaacagccta

SEQ ID NO: 4475 - DNA, 26 bp, Homo sapiens
gtccttggaggcacagaacagcctag

SEQ ID NO: 4476 - DNA, 26 bp, Homo sapiens
tccttggaggcacagaacagcctaga

SEQ ID NO: 4477 - DNA, 26 bp, Homo sapiens
ccttggaggcacagaacagcctagac

SEQ ID NO: 4478 - DNA, 26 bp, Homo sapiens
cttggaggcacagaacagcctagacc

SEQ ID NO: 4479 - DNA, 26 bp, Homo sapiens
ttggaggcacagaacagcctagaccc

SEQ ID NO: 4480 - DNA, 26 bp, Homo sapiens
tggaggcacagaacagcctagaccca

SEQ ID NO: 4481 - DNA, 26 bp, Homo sapiens
ggaggcacagaacagcctagacccag

SEQ ID NO: 4482 - DNA, 26 bp, Homo sapiens
gaggcacagaacagcctagacccagc

SEQ ID NO: 4483 - DNA, 26 bp, Homo sapiens
aggcacagaacagcctagacccagcc

SEQ ID NO: 4484 - DNA, 26 bp, Homo sapiens
ggcacagaacagcctagacccagcca

SEQ ID NO: 4485 - DNA, 26 bp, Homo sapiens
gcacagaacagcctagacccagccaa

SEQ ID NO: 4486 - DNA, 26 bp, Homo sapiens
cacagaacagcctagacccagccaag

SEQ ID NO: 4487 - DNA, 26 bp, Homo sapiens
acagaacagcctagacccagccaagc

SEQ ID NO: 4488 - DNA, 26 bp, Homo sapiens
cagaacagcctagacccagccaagct

SEQ ID NO: 4489 - DNA, 26 bp, Homo sapiens
agaacagcctagacccagccaagctc

SEQ ID NO: 4490 - DNA, 26 bp, Homo sapiens
gaacagcctagacccagccaagctct

SEQ ID NO: 4491 - DNA, 26 bp, Homo sapiens
aacagcctagacccagccaagctcta

SEQ ID NO: 4492 - DNA, 26 bp, Homo sapiens
acagcctagacccagccaagctctag

SEQ ID NO: 4493 - DNA, 26 bp, Homo sapiens
cagcctagacccagccaagctctagg

SEQ ID NO: 4494 - DNA, 26 bp, Homo sapiens
agcctagacccagccaagctctagga

SEQ ID NO: 4495 - DNA, 26 bp, Homo sapiens
gcctagacccagccaagctctaggaa

SEQ ID NO: 4496 - DNA, 26 bp, Homo sapiens
cctagacccagccaagctctaggaac

SEQ ID NO: 4497 - DNA, 26 bp, Homo sapiens
ctagacccagccaagctctaggaact

SEQ ID NO: 4498 - DNA, 26 bp, Homo sapiens
tagacccagccaagctctaggaactc

SEQ ID NO: 4499 - DNA, 26 bp, Homo sapiens
agacccagccaagctctaggaactca

SEQ ID NO: 4500 - DNA, 26 bp, Homo sapiens
gacccagccaagctctaggaactcac

SEQ ID NO: 4501 - DNA, 26 bp, Homo sapiens
acccagccaagctctaggaactcacg

SEQ ID NO: 4502 - DNA, 26 bp, Homo sapiens
cccagccaagctctaggaactcacgg

SEQ ID NO: 4503 - DNA, 26 bp, Homo sapiens
ccagccaagctctaggaactcacggt

SEQ ID NO: 4504 - DNA, 26 bp, Homo sapiens
cagccaagctctaggaactcacggtc

SEQ ID NO: 4505 - DNA, 26 bp, Homo sapiens
agccaagctctaggaactcacggtcc

SEQ ID NO: 4506 - DNA, 26 bp, Homo sapiens
gccaagctctaggaactcacggtccc

SEQ ID NO: 4507 - DNA, 26 bp, Homo sapiens
ccaagctctaggaactcacggtccca

SEQ ID NO: 4508 - DNA, 26 bp, Homo sapiens
caagctctaggaactcacggtcccaa

SEQ ID NO: 4509 - DNA, 26 bp, Homo sapiens
aagctctaggaactcacggtcccaag

SEQ ID NO: 4510 - DNA, 26 bp, Homo sapiens
agctctaggaactcacggtcccaagg

SEQ ID NO: 4511 - DNA, 26 bp, Homo sapiens
gctctaggaactcacggtcccaagga

SEQ ID NO: 4512 - DNA, 26 bp, Homo sapiens
ctctaggaactcacggtcccaaggag

SEQ ID NO: 4513 - DNA, 26 bp, Homo sapiens
tctaggaactcacggtcccaaggagt

SEQ ID NO: 4514 - DNA, 26 bp, Homo sapiens
ctaggaactcacggtcccaaggagtc

SEQ ID NO: 4515 - DNA, 26 bp, Homo sapiens
taggaactcacggtcccaaggagtct

SEQ ID NO: 4516 - DNA, 26 bp, Homo sapiens
aggaactcacggtcccaaggagtcta

SEQ ID NO: 4517 - DNA, 26 bp, Homo sapiens
ggaactcacggtcccaaggagtctag

SEQ ID NO: 4518 - DNA, 26 bp, Homo sapiens
gaactcacggtcccaaggagtctaga

SEQ ID NO: 4519 - DNA, 26 bp, Homo sapiens
aactcacggtcccaaggagtctagac

SEQ ID NO: 4520 - DNA, 26 bp, Homo sapiens
actcacggtcccaaggagtctagacg

SEQ ID NO: 4521 - DNA, 26 bp, Homo sapiens
ctcacggtcccaaggagtctagacgc

SEQ ID NO: 4522 - DNA, 26 bp, Homo sapiens
tcacggtcccaaggagtctagacgct

SEQ ID NO: 4523 - DNA, 26 bp, Homo sapiens
cacggtcccaaggagtctagacgctt

SEQ ID NO: 4524 - DNA, 26 bp, Homo sapiens
acggtcccaaggagtctagacgcttg

SEQ ID NO: 4525 - DNA, 26 bp, Homo sapiens
cggtcccaaggagtctagacgcttgt

SEQ ID NO: 4526 - DNA, 26 bp, Homo sapiens
ggtcccaaggagtctagacgcttgtt

SEQ ID NO: 4527 - DNA, 26 bp, Homo sapiens
gtcccaaggagtctagacgcttgttc

SEQ ID NO: 4528 - DNA, 26 bp, Homo sapiens
tcccaaggagtctagacgcttgttct

SEQ ID NO: 4529 - DNA, 26 bp, Homo sapiens
cccaaggagtctagacgcttgttctg

SEQ ID NO: 4530 - DNA, 26 bp, Homo sapiens
ccaaggagtctagacgcttgttctga

SEQ ID NO: 4531 - DNA, 26 bp, Homo sapiens
caaggagtctagacgcttgttctgat

SEQ ID NO: 4532 - DNA, 26 bp, Homo sapiens
aaggagtctagacgcttgttctgatg

SEQ ID NO: 4533 - DNA, 26 bp, Homo sapiens
aggagtctagacgcttgttctgatgc

SEQ ID NO: 4534 - DNA, 26 bp, Homo sapiens
ggagtctagacgcttgttctgatgct

SEQ ID NO: 4535 - DNA, 26 bp, Homo sapiens
gagtctagacgcttgttctgatgctc

SEQ ID NO: 4536 - DNA, 26 bp, Homo sapiens
agtctagacgcttgttctgatgctcc

SEQ ID NO: 4537 - DNA, 26 bp, Homo sapiens
gtctagacgcttgttctgatgctccg

SEQ ID NO: 4538 - DNA, 26 bp, Homo sapiens
tctagacgcttgttctgatgctccga

SEQ ID NO: 4539 - DNA, 26 bp, Homo sapiens
ctagacgcttgttctgatgctccgac

SEQ ID NO: 4540 - DNA, 26 bp, Homo sapiens
tagacgcttgttctgatgctccgacc

SEQ ID NO: 4541 - DNA, 26 bp, Homo sapiens
agacgcttgttctgatgctccgaccg

SEQ ID NO: 4542 - DNA, 26 bp, Homo sapiens
gacgcttgttctgatgctccgaccgt

SEQ ID NO: 4543 - DNA, 26 bp, Homo sapiens
acgcttgttctgatgctccgaccgta

SEQ ID NO: 4544 - DNA, 26 bp, Homo sapiens
cgcttgttctgatgctccgaccgtaa

SEQ ID NO: 4545 - DNA, 26 bp, Homo sapiens
gcttgttctgatgctccgaccgtaag

SEQ ID NO: 4546 - DNA, 26 bp, Homo sapiens
cttgttctgatgctccgaccgtaaga

SEQ ID NO: 4547 - DNA, 26 bp, Homo sapiens
ttgttctgatgctccgaccgtaagaa

SEQ ID NO: 4548 - DNA, 26 bp, Homo sapiens
tgttctgatgctccgaccgtaagaaa

SEQ ID NO: 4549 - DNA, 26 bp, Homo sapiens
gttctgatgctccgaccgtaagaaaa

SEQ ID NO: 4550 - DNA, 26 bp, Homo sapiens
ttctgatgctccgaccgtaagaaaaa

SEQ ID NO: 4551 - DNA, 26 bp, Homo sapiens
tctgatgctccgaccgtaagaaaaat

SEQ ID NO: 4552 - DNA, 26 bp, Homo sapiens
ctgatgctccgaccgtaagaaaaatg

SEQ ID NO: 4553 - DNA, 26 bp, Homo sapiens
tgatgctccgaccgtaagaaaaatgt

SEQ ID NO: 4554 - DNA, 26 bp, Homo sapiens
gatgctccgaccgtaagaaaaatgtg

SEQ ID NO: 4555 - DNA, 26 bp, Homo sapiens
atgctccgaccgtaagaaaaatgtgg

SEQ ID NO: 4556 - DNA, 26 bp, Homo sapiens
tgctccgaccgtaagaaaaatgtggg

SEQ ID NO: 4557 - DNA, 26 bp, Homo sapiens
gctccgaccgtaagaaaaatgtggga

SEQ ID NO: 4558 - DNA, 26 bp, Homo sapiens
ctccgaccgtaagaaaaatgtgggag

SEQ ID NO: 4559 - DNA, 26 bp, Homo sapiens
tccgaccgtaagaaaaatgtgggagt

SEQ ID NO: 4560 - DNA, 26 bp, Homo sapiens
ccgaccgtaagaaaaatgtgggagtg

SEQ ID NO: 4561 - DNA, 26 bp, Homo sapiens
cgaccgtaagaaaaatgtgggagtga

SEQ ID NO: 4562 - DNA, 26 bp, Homo sapiens
gaccgtaagaaaaatgtgggagtgat

SEQ ID NO: 4563 - DNA, 26 bp, Homo sapiens
accgtaagaaaaatgtgggagtgatg

SEQ ID NO: 4564 - DNA, 26 bp, Homo sapiens
ccgtaagaaaaatgtgggagtgatga

SEQ ID NO: 4565 - DNA, 26 bp, Homo sapiens
cgtaagaaaaatgtgggagtgatgaa

SEQ ID NO: 4566 - DNA, 26 bp, Homo sapiens
gtaagaaaaatgtgggagtgatgaag

SEQ ID NO: 4567 - DNA, 26 bp, Homo sapiens
taagaaaaatgtgggagtgatgaagg

SEQ ID NO: 4568 - DNA, 26 bp, Homo sapiens
aagaaaaatgtgggagtgatgaaggc

SEQ ID NO: 4569 - DNA, 26 bp, Homo sapiens
agaaaaatgtgggagtgatgaaggct

SEQ ID NO: 4570 - DNA, 26 bp, Homo sapiens
gaaaaatgtgggagtgatgaaggctt

SEQ ID NO: 4571 - DNA, 26 bp, Homo sapiens
aaaaatgtgggagtgatgaaggcttt

SEQ ID NO: 4572 - DNA, 26 bp, Homo sapiens
aaaatgtgggagtgatgaaggcttta

SEQ ID NO: 4573 - DNA, 26 bp, Homo sapiens
aaatgtgggagtgatgaaggctttat

SEQ ID NO: 4574 - DNA, 26 bp, Homo sapiens
aatgtgggagtgatgaaggctttatg

SEQ ID NO: 4575 - DNA, 26 bp, Homo sapiens
atgtgggagtgatgaaggctttatga

SEQ ID NO: 4576 - DNA, 26 bp, Homo sapiens
tgtgggagtgatgaaggctttatgat

SEQ ID NO: 4577 - DNA, 26 bp, Homo sapiens
gtgggagtgatgaaggctttatgatt

SEQ ID NO: 4578 - DNA, 26 bp, Homo sapiens
tgggagtgatgaaggctttatgattt

SEQ ID NO: 4579 - DNA, 26 bp, Homo sapiens
gggagtgatgaaggctttatgattta

SEQ ID NO: 4580 - DNA, 26 bp, Homo sapiens
ggagtgatgaaggctttatgatttac

SEQ ID NO: 4581 - DNA, 26 bp, Homo sapiens
gagtgatgaaggctttatgatttact

SEQ ID NO: 4582 - DNA, 26 bp, Homo sapiens
agtgatgaaggctttatgatttactc

SEQ ID NO: 4583 - DNA, 26 bp, Homo sapiens
gtgatgaaggctttatgatttactca

SEQ ID NO: 4584 - DNA, 26 bp, Homo sapiens
tgatgaaggctttatgatttactcat

SEQ ID NO: 4585 - DNA, 26 bp, Homo sapiens
gatgaaggctttatgatttactcatt

SEQ ID NO: 4586 - DNA, 26 bp, Homo sapiens
atgaaggctttatgatttactcatta

SEQ ID NO: 4587 - DNA, 26 bp, Homo sapiens
tgaaggctttatgatttactcattat

SEQ ID NO: 4588 - DNA, 26 bp, Homo sapiens
gaaggctttatgatttactcattata

SEQ ID NO: 4589 - DNA, 26 bp, Homo sapiens
aaggctttatgatttactcattatag

SEQ ID NO: 4590 - DNA, 26 bp, Homo sapiens
aggctttatgatttactcattatagt

SEQ ID NO: 4591 - DNA, 26 bp, Homo sapiens
ggctttatgatttactcattatagta

SEQ ID NO: 4592 - DNA, 26 bp, Homo sapiens
gctttatgatttactcattatagtaa

SEQ ID NO: 4593 - DNA, 26 bp, Homo sapiens
ctttatgatttactcattatagtaat

SEQ ID NO: 4594 - DNA, 26 bp, Homo sapiens
tttatgatttactcattatagtaata

SEQ ID NO: 4595 - DNA, 26 bp, Homo sapiens
ttatgatttactcattatagtaataa

SEQ ID NO: 4596 - DNA, 26 bp, Homo sapiens
tatgatttactcattatagtaataat

SEQ ID NO: 4597 - DNA, 26 bp, Homo sapiens
atgatttactcattatagtaataata

SEQ ID NO: 4598 - DNA, 26 bp, Homo sapiens
tgatttactcattatagtaataatag

SEQ ID NO: 4599 - DNA, 26 bp, Homo sapiens
gatttactcattatagtaataatagc

SEQ ID NO: 4600 - DNA, 26 bp, Homo sapiens
atttactcattatagtaataatagca

SEQ ID NO: 4601 - DNA, 26 bp, Homo sapiens
tttactcattatagtaataatagcag

SEQ ID NO: 4602 - DNA, 26 bp, Homo sapiens
ttactcattatagtaataatagcagc

SEQ ID NO: 4603 - DNA, 26 bp, Homo sapiens
tactcattatagtaataatagcagcc

SEQ ID NO: 4604 - DNA, 26 bp, Homo sapiens
actcattatagtaataatagcagcct

SEQ ID NO: 4605 - DNA, 26 bp, Homo sapiens
ctcattatagtaataatagcagccta

SEQ ID NO: 4606 - DNA, 26 bp, Homo sapiens
tcattatagtaataatagcagcctag

SEQ ID NO: 4607 - DNA, 26 bp, Homo sapiens
cattatagtaataatagcagcctagc

SEQ ID NO: 4608 - DNA, 26 bp, Homo sapiens
attatagtaataatagcagcctagct

SEQ ID NO: 4609 - DNA, 26 bp, Homo sapiens
ttatagtaataatagcagcctagcta

SEQ ID NO: 4610 - DNA, 26 bp, Homo sapiens
tatagtaataatagcagcctagctag

SEQ ID NO: 4611 - DNA, 26 bp, Homo sapiens
atagtaataatagcagcctagctagg

SEQ ID NO: 4612 - DNA, 26 bp, Homo sapiens
tagtaataatagcagcctagctaggt

SEQ ID NO: 4613 - DNA, 26 bp, Homo sapiens
agtaataatagcagcctagctaggta

SEQ ID NO: 4614 - DNA, 26 bp, Homo sapiens
gtaataatagcagcctagctaggtac

SEQ ID NO: 4615 - DNA, 26 bp, Homo sapiens
taataatagcagcctagctaggtaca

SEQ ID NO: 4616 - DNA, 26 bp, Homo sapiens
aataatagcagcctagctaggtacaa

SEQ ID NO: 4617 - DNA, 26 bp, Homo sapiens
ataatagcagcctagctaggtacaaa

SEQ ID NO: 4618 - DNA, 26 bp, Homo sapiens
taatagcagcctagctaggtacaaaa

SEQ ID NO: 4619 - DNA, 26 bp, Homo sapiens
aatagcagcctagctaggtacaaaag

SEQ ID NO: 4620 - DNA, 26 bp, Homo sapiens
atagcagcctagctaggtacaaaagc

SEQ ID NO: 4621 - DNA, 26 bp, Homo sapiens
tagcagcctagctaggtacaaaagca

SEQ ID NO: 4622 - DNA, 26 bp, Homo sapiens
agcagcctagctaggtacaaaagcag

SEQ ID NO: 4623 - DNA, 26 bp, Homo sapiens
gcagcctagctaggtacaaaagcagt

SEQ ID NO: 4624 - DNA, 26 bp, Homo sapiens
cagcctagctaggtacaaaagcagtt

SEQ ID NO: 4625 - DNA, 26 bp, Homo sapiens
agcctagctaggtacaaaagcagtta

SEQ ID NO: 4626 - DNA, 26 bp, Homo sapiens
gcctagctaggtacaaaagcagttat

SEQ ID NO: 4627 - DNA, 26 bp, Homo sapiens
cctagctaggtacaaaagcagttata

SEQ ID NO: 4628 - DNA, 26 bp, Homo sapiens
ctagctaggtacaaaagcagttataa

SEQ ID NO: 4629 - DNA, 26 bp, Homo sapiens
tagctaggtacaaaagcagttataaa

SEQ ID NO: 4630 - DNA, 26 bp, Homo sapiens
agctaggtacaaaagcagttataaac

SEQ ID NO: 4631 - DNA, 26 bp, Homo sapiens
gctaggtacaaaagcagttataaacc

SEQ ID NO: 4632 - DNA, 26 bp, Homo sapiens
ctaggtacaaaagcagttataaacca

SEQ ID NO: 4633 - DNA, 26 bp, Homo sapiens
taggtacaaaagcagttataaaccat

SEQ ID NO: 4634 - DNA, 26 bp, Homo sapiens
aggtacaaaagcagttataaaccatt

SEQ ID NO: 4635 - DNA, 26 bp, Homo sapiens
ggtacaaaagcagttataaaccattt

SEQ ID NO: 4636 - DNA, 26 bp, Homo sapiens
gtacaaaagcagttataaaccattta

SEQ ID NO: 4637 - DNA, 26 bp, Homo sapiens
tacaaaagcagttataaaccatttat

SEQ ID NO: 4638 - DNA, 26 bp, Homo sapiens
acaaaagcagttataaaccatttata

SEQ ID NO: 4639 - DNA, 26 bp, Homo sapiens
caaaagcagttataaaccatttatat

SEQ ID NO: 4640 - DNA, 26 bp, Homo sapiens
aaaagcagttataaaccatttatatt

SEQ ID NO: 4641 - DNA, 26 bp, Homo sapiens
aaagcagttataaaccatttatatta

SEQ ID NO: 4642 - DNA, 26 bp, Homo sapiens
aagcagttataaaccatttatattac

SEQ ID NO: 4643 - DNA, 26 bp, Homo sapiens
agcagttataaaccatttatattaca

SEQ ID NO: 4644 - DNA, 26 bp, Homo sapiens
gcagttataaaccatttatattacac

SEQ ID NO: 4645 - DNA, 26 bp, Homo sapiens
cagttataaaccatttatattacaca

SEQ ID NO: 4646 - DNA, 26 bp, Homo sapiens
agttataaaccatttatattacacag

SEQ ID NO: 4647 - DNA, 26 bp, Homo sapiens
gttataaaccatttatattacacaga

SEQ ID NO: 4648 - DNA, 26 bp, Homo sapiens
ttataaaccatttatattacacagaa

SEQ ID NO: 4649 - DNA, 26 bp, Homo sapiens
tataaaccatttatattacacagaat

SEQ ID NO: 4650 - DNA, 26 bp, Homo sapiens
ataaaccatttatattacacagaatt

SEQ ID NO: 4651 - DNA, 26 bp, Homo sapiens
taaaccatttatattacacagaatta

SEQ ID NO: 4652 - DNA, 26 bp, Homo sapiens
aaaccatttatattacacagaattat

SEQ ID NO: 4653 - DNA, 26 bp, Homo sapiens
aaccatttatattacacagaattatt

SEQ ID NO: 4654 - DNA, 26 bp, Homo sapiens
accatttatattacacagaattattc

SEQ ID NO: 4655 - DNA, 26 bp, Homo sapiens
ccatttatattacacagaattattca

SEQ ID NO: 4656 - DNA, 26 bp, Homo sapiens
catttatattacacagaattattcag

SEQ ID NO: 4657 - DNA, 26 bp, Homo sapiens
atttatattacacagaattattcagg

SEQ ID NO: 4658 - DNA, 26 bp, Homo sapiens
tttatattacacagaattattcaggt

SEQ ID NO: 4659 - DNA, 26 bp, Homo sapiens
ttatattacacagaattattcaggtc

SEQ ID NO: 4660 - DNA, 26 bp, Homo sapiens
tatattacacagaattattcaggtct

SEQ ID NO: 4661 - DNA, 26 bp, Homo sapiens
atattacacagaattattcaggtctc

SEQ ID NO: 4662 - DNA, 26 bp, Homo sapiens
tattacacagaattattcaggtctcc

SEQ ID NO: 4663 - DNA, 26 bp, Homo sapiens
attacacagaattattcaggtctcca

SEQ ID NO: 4664 - DNA, 26 bp, Homo sapiens
ttacacagaattattcaggtctccat

SEQ ID NO: 4665 - DNA, 26 bp, Homo sapiens
tacacagaattattcaggtctccatt

SEQ ID NO: 4666 - DNA, 26 bp, Homo sapiens
acacagaattattcaggtctccattc

SEQ ID NO: 4667 - DNA, 26 bp, Homo sapiens
cacagaattattcaggtctccattct

SEQ ID NO: 4668 - DNA, 26 bp, Homo sapiens
acagaattattcaggtctccattcta

SEQ ID NO: 4669 - DNA, 26 bp, Homo sapiens
cagaattattcaggtctccattctat

SEQ ID NO: 4670 - DNA, 26 bp, Homo sapiens
agaattattcaggtctccattctatc

SEQ ID NO: 4671 - DNA, 26 bp, Homo sapiens
gaattattcaggtctccattctatct

SEQ ID NO: 4672 - DNA, 26 bp, Homo sapiens
aattattcaggtctccattctatctt

SEQ ID NO: 4673 - DNA, 26 bp, Homo sapiens
attattcaggtctccattctatctta

SEQ ID NO: 4674 - DNA, 26 bp, Homo sapiens
ttattcaggtctccattctatcttat

SEQ ID NO: 4675 - DNA, 26 bp, Homo sapiens
tattcaggtctccattctatcttatg

SEQ ID NO: 4676 - DNA, 26 bp, Homo sapiens
attcaggtctccattctatcttatgt

SEQ ID NO: 4677 - DNA, 26 bp, Homo sapiens
ttcaggtctccattctatcttatgtt

SEQ ID NO: 4678 - DNA, 26 bp, Homo sapiens
tcaggtctccattctatcttatgttg

SEQ ID NO: 4679 - DNA, 26 bp, Homo sapiens
caggtctccattctatcttatgttgt

SEQ ID NO: 4680 - DNA, 26 bp, Homo sapiens
aggtctccattctatcttatgttgta

SEQ ID NO: 4681 - DNA, 26 bp, Homo sapiens
ggtctccattctatcttatgttgtaa

SEQ ID NO: 4682 - DNA, 26 bp, Homo sapiens
gtctccattctatcttatgttgtaaa

SEQ ID NO: 4683 - DNA, 26 bp, Homo sapiens
tctccattctatcttatgttgtaaaa

SEQ ID NO: 4684 - DNA, 26 bp, Homo sapiens
ctccattctatcttatgttgtaaaat

SEQ ID NO: 4685 - DNA, 26 bp, Homo sapiens
tccattctatcttatgttgtaaaatt

SEQ ID NO: 4686 - DNA, 26 bp, Homo sapiens
ccattctatcttatgttgtaaaattg

SEQ ID NO: 4687 - DNA, 26 bp, Homo sapiens
cattctatcttatgttgtaaaattgt

SEQ ID NO: 4688 - DNA, 26 bp, Homo sapiens
attctatcttatgttgtaaaattgtt

SEQ ID NO: 4689 - DNA, 26 bp, Homo sapiens
ttctatcttatgttgtaaaattgtta

SEQ ID NO: 4690 - DNA, 26 bp, Homo sapiens
tctatcttatgttgtaaaattgttaa

SEQ ID NO: 4691 - DNA, 26 bp, Homo sapiens
ctatcttatgttgtaaaattgttaat

SEQ ID NO: 4692 - DNA, 26 bp, Homo sapiens
tatcttatgttgtaaaattgttaatt

SEQ ID NO: 4693 - DNA, 26 bp, Homo sapiens
atcttatgttgtaaaattgttaattg

SEQ ID NO: 4694 - DNA, 26 bp, Homo sapiens
tcttatgttgtaaaattgttaattgg

SEQ ID NO: 4695 - DNA, 26 bp, Homo sapiens
cttatgttgtaaaattgttaattgga

SEQ ID NO: 4696 - DNA, 26 bp, Homo sapiens
ttatgttgtaaaattgttaattggat

SEQ ID NO: 4697 - DNA, 26 bp, Homo sapiens
tatgttgtaaaattgttaattggatt

SEQ ID NO: 4698 - DNA, 26 bp, Homo sapiens
atgttgtaaaattgttaattggattt

SEQ ID NO: 4699 - DNA, 26 bp, Homo sapiens
tgttgtaaaattgttaattggatttc

SEQ ID NO: 4700 - DNA, 26 bp, Homo sapiens
gttgtaaaattgttaattggatttcc

SEQ ID NO: 4701 - DNA, 26 bp, Homo sapiens
ttgtaaaattgttaattggatttcca

SEQ ID NO: 4702 - DNA, 26 bp, Homo sapiens
tgtaaaattgttaattggatttccag

SEQ ID NO: 4703 - DNA, 26 bp, Homo sapiens
gtaaaattgttaattggatttccagt

SEQ ID NO: 4704 - DNA, 26 bp, Homo sapiens
taaaattgttaattggatttccagtg

SEQ ID NO: 4705 - DNA, 26 bp, Homo sapiens
aaaattgttaattggatttccagtga

SEQ ID NO: 4706 - DNA, 26 bp, Homo sapiens
aaattgttaattggatttccagtgag

SEQ ID NO: 4707 - DNA, 26 bp, Homo sapiens
aattgttaattggatttccagtgagt

SEQ ID NO: 4708 - DNA, 26 bp, Homo sapiens
attgttaattggatttccagtgagtt

SEQ ID NO: 4709 - DNA, 26 bp, Homo sapiens
ttgttaattggatttccagtgagttg

SEQ ID NO: 4710 - DNA, 26 bp, Homo sapiens
tgttaattggatttccagtgagttgt

SEQ ID NO: 4711 - DNA, 26 bp, Homo sapiens
gttaattggatttccagtgagttgtt

SEQ ID NO: 4712 - DNA, 26 bp, Homo sapiens
ttaattggatttccagtgagttgttt

SEQ ID NO: 4713 - DNA, 26 bp, Homo sapiens
taattggatttccagtgagttgttta

SEQ ID NO: 4714 - DNA, 26 bp, Homo sapiens
aattggatttccagtgagttgtttag

SEQ ID NO: 4715 - DNA, 26 bp, Homo sapiens
attggatttccagtgagttgtttaga

SEQ ID NO: 4716 - DNA, 26 bp, Homo sapiens
ttggatttccagtgagttgtttagat

SEQ ID NO: 4717 - DNA, 26 bp, Homo sapiens
tggatttccagtgagttgtttagatg

SEQ ID NO: 4718 - DNA, 26 bp, Homo sapiens
ggatttccagtgagttgtttagatga

SEQ ID NO: 4719 - DNA, 26 bp, Homo sapiens
gatttccagtgagttgtttagatgat

SEQ ID NO: 4720 - DNA, 26 bp, Homo sapiens
atttccagtgagttgtttagatgatt

SEQ ID NO: 4721 - DNA, 26 bp, Homo sapiens
tttccagtgagttgtttagatgatta

SEQ ID NO: 4722 - DNA, 26 bp, Homo sapiens
ttccagtgagttgtttagatgattag

SEQ ID NO: 4723 - DNA, 26 bp, Homo sapiens
tccagtgagttgtttagatgattagt

SEQ ID NO: 4724 - DNA, 26 bp, Homo sapiens
ccagtgagttgtttagatgattagtg

SEQ ID NO: 4725 - DNA, 26 bp, Homo sapiens
cagtgagttgtttagatgattagtga

SEQ ID NO: 4726 - DNA, 26 bp, Homo sapiens
agtgagttgtttagatgattagtgat

SEQ ID NO: 4727 - DNA, 26 bp, Homo sapiens
gtgagttgtttagatgattagtgata

SEQ ID NO: 4728 - DNA, 26 bp, Homo sapiens
tgagttgtttagatgattagtgataa

SEQ ID NO: 4729 - DNA, 26 bp, Homo sapiens
gagttgtttagatgattagtgataat

SEQ ID NO: 4730 - DNA, 26 bp, Homo sapiens
agttgtttagatgattagtgataata

SEQ ID NO: 4731 - DNA, 26 bp, Homo sapiens
gttgtttagatgattagtgataataa

SEQ ID NO: 4732 - DNA, 26 bp, Homo sapiens
ttgtttagatgattagtgataataag

SEQ ID NO: 4733 - DNA, 26 bp, Homo sapiens
tgtttagatgattagtgataataagg

SEQ ID NO: 4734 - DNA, 26 bp, Homo sapiens
gtttagatgattagtgataataagga

SEQ ID NO: 4735 - DNA, 26 bp, Homo sapiens
tttagatgattagtgataataaggaa

SEQ ID NO: 4736 - DNA, 26 bp, Homo sapiens
ttagatgattagtgataataaggaat

SEQ ID NO: 4737 - DNA, 26 bp, Homo sapiens
tagatgattagtgataataaggaatg

SEQ ID NO: 4738 - DNA, 26 bp, Homo sapiens
agatgattagtgataataaggaatgg

SEQ ID NO: 4739 - DNA, 26 bp, Homo sapiens
gatgattagtgataataaggaatggt

SEQ ID NO: 4740 - DNA, 26 bp, Homo sapiens
atgattagtgataataaggaatggta

SEQ ID NO: 4741 - DNA, 26 bp, Homo sapiens
tgattagtgataataaggaatggtaa

SEQ ID NO: 4742 - DNA, 26 bp, Homo sapiens
gattagtgataataaggaatggtaaa

SEQ ID NO: 4743 - DNA, 26 bp, Homo sapiens
attagtgataataaggaatggtaaat

SEQ ID NO: 4744 - DNA, 26 bp, Homo sapiens
ttagtgataataaggaatggtaaatc

SEQ ID NO: 4745 - DNA, 26 bp, Homo sapiens
tagtgataataaggaatggtaaatcc

SEQ ID NO: 4746 - DNA, 26 bp, Homo sapiens
agtgataataaggaatggtaaatcca

SEQ ID NO: 4747 - DNA, 26 bp, Homo sapiens
gtgataataaggaatggtaaatccat

SEQ ID NO: 4748 - DNA, 26 bp, Homo sapiens
tgataataaggaatggtaaatccata

SEQ ID NO: 4749 - DNA, 26 bp, Homo sapiens
gataataaggaatggtaaatccatag

SEQ ID NO: 4750 - DNA, 26 bp, Homo sapiens
ataataaggaatggtaaatccatagc

SEQ ID NO: 4751 - DNA, 26 bp, Homo sapiens
taataaggaatggtaaatccatagca

SEQ ID NO: 4752 - DNA, 26 bp, Homo sapiens
aataaggaatggtaaatccatagcac

SEQ ID NO: 4753 - DNA, 26 bp, Homo sapiens
ataaggaatggtaaatccatagcacc

SEQ ID NO: 4754 - DNA, 26 bp, Homo sapiens
taaggaatggtaaatccatagcacca

SEQ ID NO: 4755 - DNA, 26 bp, Homo sapiens
aaggaatggtaaatccatagcaccat

SEQ ID NO: 4756 - DNA, 26 bp, Homo sapiens
aggaatggtaaatccatagcaccatt

SEQ ID NO: 4757 - DNA, 26 bp, Homo sapiens
ggaatggtaaatccatagcaccattt

SEQ ID NO: 4758 - DNA, 26 bp, Homo sapiens
gaatggtaaatccatagcaccatttc

SEQ ID NO: 4759 - DNA, 26 bp, Homo sapiens
aatggtaaatccatagcaccatttca

SEQ ID NO: 4760 - DNA, 26 bp, Homo sapiens
atggtaaatccatagcaccatttcaa

SEQ ID NO: 4761 - DNA, 26 bp, Homo sapiens
tggtaaatccatagcaccatttcaaa

SEQ ID NO: 4762 - DNA, 26 bp, Homo sapiens
ggtaaatccatagcaccatttcaaag

SEQ ID NO: 4763 - DNA, 26 bp, Homo sapiens
gtaaatccatagcaccatttcaaaga

SEQ ID NO: 4764 - DNA, 26 bp, Homo sapiens
taaatccatagcaccatttcaaagac

SEQ ID NO: 4765 - DNA, 26 bp, Homo sapiens
aaatccatagcaccatttcaaagact

SEQ ID NO: 4766 - DNA, 26 bp, Homo sapiens
aatccatagcaccatttcaaagactt

SEQ ID NO: 4767 - DNA, 26 bp, Homo sapiens
atccatagcaccatttcaaagacttg

SEQ ID NO: 4768 - DNA, 26 bp, Homo sapiens
tccatagcaccatttcaaagacttgt

SEQ ID NO: 4769 - DNA, 26 bp, Homo sapiens
ccatagcaccatttcaaagacttgtt

SEQ ID NO: 4770 - DNA, 26 bp, Homo sapiens
catagcaccatttcaaagacttgttg

SEQ ID NO: 4771 - DNA, 26 bp, Homo sapiens
atagcaccatttcaaagacttgttgt

SEQ ID NO: 4772 - DNA, 26 bp, Homo sapiens
tagcaccatttcaaagacttgttgtc

SEQ ID NO: 4773 - DNA, 26 bp, Homo sapiens
agcaccatttcaaagacttgttgtca

SEQ ID NO: 4774 - DNA, 26 bp, Homo sapiens
gcaccatttcaaagacttgttgtcac

SEQ ID NO: 4775 - DNA, 26 bp, Homo sapiens
caccatttcaaagacttgttgtcact

SEQ ID NO: 4776 - DNA, 26 bp, Homo sapiens
accatttcaaagacttgttgtcactg

SEQ ID NO: 4777 - DNA, 26 bp, Homo sapiens
ccatttcaaagacttgttgtcactga

SEQ ID NO: 4778 - DNA, 26 bp, Homo sapiens
catttcaaagacttgttgtcactgat

SEQ ID NO: 4779 - DNA, 26 bp, Homo sapiens
atttcaaagacttgttgtcactgatt

SEQ ID NO: 4780 - DNA, 26 bp, Homo sapiens
tttcaaagacttgttgtcactgattt

SEQ ID NO: 4781 - DNA, 26 bp, Homo sapiens
ttcaaagacttgttgtcactgatttc

SEQ ID NO: 4782 - DNA, 26 bp, Homo sapiens
tcaaagacttgttgtcactgatttct

SEQ ID NO: 4783 - DNA, 26 bp, Homo sapiens
caaagacttgttgtcactgatttctc

SEQ ID NO: 4784 - DNA, 26 bp, Homo sapiens
aaagacttgttgtcactgatttctca

SEQ ID NO: 4785 - DNA, 26 bp, Homo sapiens
aagacttgttgtcactgatttctcat

SEQ ID NO: 4786 - DNA, 26 bp, Homo sapiens
agacttgttgtcactgatttctcatt

SEQ ID NO: 4787 - DNA, 26 bp, Homo sapiens
gacttgttgtcactgatttctcattt

SEQ ID NO: 4788 - DNA, 26 bp, Homo sapiens
acttgttgtcactgatttctcattta

SEQ ID NO: 4789 - DNA, 26 bp, Homo sapiens
cttgttgtcactgatttctcatttag

SEQ ID NO: 4790 - DNA, 26 bp, Homo sapiens
ttgttgtcactgatttctcatttaga

SEQ ID NO: 4791 - DNA, 26 bp, Homo sapiens
tgttgtcactgatttctcatttagat

SEQ ID NO: 4792 - DNA, 26 bp, Homo sapiens
gttgtcactgatttctcatttagatg

SEQ ID NO: 4793 - DNA, 26 bp, Homo sapiens
ttgtcactgatttctcatttagatgt

SEQ ID NO: 4794 - DNA, 26 bp, Homo sapiens
tgtcactgatttctcatttagatgtg

SEQ ID NO: 4795 - DNA, 26 bp, Homo sapiens
gtcactgatttctcatttagatgtgt

SEQ ID NO: 4796 - DNA, 26 bp, Homo sapiens
tcactgatttctcatttagatgtgtg

SEQ ID NO: 4797 - DNA, 26 bp, Homo sapiens
cactgatttctcatttagatgtgtga

SEQ ID NO: 4798 - DNA, 26 bp, Homo sapiens
actgatttctcatttagatgtgtgac

SEQ ID NO: 4799 - DNA, 26 bp, Homo sapiens
ctgatttctcatttagatgtgtgacg

SEQ ID NO: 4800 - DNA, 26 bp, Homo sapiens
tgatttctcatttagatgtgtgacga

SEQ ID NO: 4801 - DNA, 26 bp, Homo sapiens
gatttctcatttagatgtgtgacgaa

SEQ ID NO: 4802 - DNA, 26 bp, Homo sapiens
atttctcatttagatgtgtgacgaag

SEQ ID NO: 4803 - DNA, 26 bp, Homo sapiens
tttctcatttagatgtgtgacgaaga

SEQ ID NO: 4804 - DNA, 26 bp, Homo sapiens
ttctcatttagatgtgtgacgaagat

SEQ ID NO: 4805 - DNA, 26 bp, Homo sapiens
tctcatttagatgtgtgacgaagata

SEQ ID NO: 4806 - DNA, 26 bp, Homo sapiens
ctcatttagatgtgtgacgaagatac

SEQ ID NO: 4807 - DNA, 26 bp, Homo sapiens
tcatttagatgtgtgacgaagatact

SEQ ID NO: 4808 - DNA, 26 bp, Homo sapiens
catttagatgtgtgacgaagatactc

SEQ ID NO: 4809 - DNA, 26 bp, Homo sapiens
atttagatgtgtgacgaagatactcc

SEQ ID NO: 4810 - DNA, 26 bp, Homo sapiens
tttagatgtgtgacgaagatactcca

SEQ ID NO: 4811 - DNA, 26 bp, Homo sapiens
ttagatgtgtgacgaagatactccac

SEQ ID NO: 4812 - DNA, 26 bp, Homo sapiens
tagatgtgtgacgaagatactccacc

SEQ ID NO: 4813 - DNA, 26 bp, Homo sapiens
agatgtgtgacgaagatactccacct

SEQ ID NO: 4814 - DNA, 26 bp, Homo sapiens
gatgtgtgacgaagatactccacctg

SEQ ID NO: 4815 - DNA, 26 bp, Homo sapiens
atgtgtgacgaagatactccacctgt

SEQ ID NO: 4816 - DNA, 26 bp, Homo sapiens
tgtgtgacgaagatactccacctgta

SEQ ID NO: 4817 - DNA, 26 bp, Homo sapiens
gtgtgacgaagatactccacctgtaa

SEQ ID NO: 4818 - DNA, 26 bp, Homo sapiens
tgtgacgaagatactccacctgtaag

SEQ ID NO: 4819 - DNA, 26 bp, Homo sapiens
gtgacgaagatactccacctgtaagg

SEQ ID NO: 4820 - DNA, 26 bp, Homo sapiens
tgacgaagatactccacctgtaaggg

SEQ ID NO: 4821 - DNA, 26 bp, Homo sapiens
gacgaagatactccacctgtaagggc

SEQ ID NO: 4822 - DNA, 26 bp, Homo sapiens
acgaagatactccacctgtaagggca

SEQ ID NO: 4823 - DNA, 26 bp, Homo sapiens
cgaagatactccacctgtaagggcaa

SEQ ID NO: 4824 - DNA, 26 bp, Homo sapiens
gaagatactccacctgtaagggcaag

SEQ ID NO: 4825 - DNA, 26 bp, Homo sapiens
aagatactccacctgtaagggcaagt

SEQ ID NO: 4826 - DNA, 26 bp, Homo sapiens
agatactccacctgtaagggcaagta

SEQ ID NO: 4827 - DNA, 26 bp, Homo sapiens
gatactccacctgtaagggcaagtat

SEQ ID NO: 4828 - DNA, 26 bp, Homo sapiens
atactccacctgtaagggcaagtatg

SEQ ID NO: 4829 - DNA, 26 bp, Homo sapiens
tactccacctgtaagggcaagtatgc

SEQ ID NO: 4830 - DNA, 26 bp, Homo sapiens
actccacctgtaagggcaagtatgcc

SEQ ID NO: 4831 - DNA, 26 bp, Homo sapiens
ctccacctgtaagggcaagtatgcca

SEQ ID NO: 4832 - DNA, 26 bp, Homo sapiens
tccacctgtaagggcaagtatgccaa

SEQ ID NO: 4833 - DNA, 26 bp, Homo sapiens
ccacctgtaagggcaagtatgccaat

SEQ ID NO: 4834 - DNA, 26 bp, Homo sapiens
cacctgtaagggcaagtatgccaatg

SEQ ID NO: 4835 - DNA, 26 bp, Homo sapiens
acctgtaagggcaagtatgccaatgc

SEQ ID NO: 4836 - DNA, 26 bp, Homo sapiens
cctgtaagggcaagtatgccaatgcc

SEQ ID NO: 4837 - DNA, 26 bp, Homo sapiens
ctgtaagggcaagtatgccaatgcca

SEQ ID NO: 4838 - DNA, 26 bp, Homo sapiens
tgtaagggcaagtatgccaatgccac

SEQ ID NO: 4839 - DNA, 26 bp, Homo sapiens
gtaagggcaagtatgccaatgccaca

SEQ ID NO: 4840 - DNA, 26 bp, Homo sapiens
taagggcaagtatgccaatgccacaa

SEQ ID NO: 4841 - DNA, 26 bp, Homo sapiens
aagggcaagtatgccaatgccacaag

SEQ ID NO: 4842 - DNA, 26 bp, Homo sapiens
agggcaagtatgccaatgccacaagc

SEQ ID NO: 4843 - DNA, 26 bp, Homo sapiens
gggcaagtatgccaatgccacaagcc

SEQ ID NO: 4844 - DNA, 26 bp, Homo sapiens
ggcaagtatgccaatgccacaagccg

SEQ ID NO: 4845 - DNA, 26 bp, Homo sapiens
gcaagtatgccaatgccacaagccgt

SEQ ID NO: 4846 - DNA, 26 bp, Homo sapiens
caagtatgccaatgccacaagccgtg

SEQ ID NO: 4847 - DNA, 26 bp, Homo sapiens
aagtatgccaatgccacaagccgtgt

SEQ ID NO: 4848 - DNA, 26 bp, Homo sapiens
agtatgccaatgccacaagccgtgtt

SEQ ID NO: 4849 - DNA, 26 bp, Homo sapiens
gtatgccaatgccacaagccgtgttt

SEQ ID NO: 4850 - DNA, 26 bp, Homo sapiens
tatgccaatgccacaagccgtgtttt

SEQ ID NO: 4851 - DNA, 26 bp, Homo sapiens
atgccaatgccacaagccgtgttttt

SEQ ID NO: 4852 - DNA, 26 bp, Homo sapiens
tgccaatgccacaagccgtgtttttg

SEQ ID NO: 4853 - DNA, 26 bp, Homo sapiens
gccaatgccacaagccgtgtttttgc

SEQ ID NO: 4854 - DNA, 26 bp, Homo sapiens
ccaatgccacaagccgtgtttttgca

SEQ ID NO: 4855 - DNA, 26 bp, Homo sapiens
caatgccacaagccgtgtttttgcaa

SEQ ID NO: 4856 - DNA, 26 bp, Homo sapiens
aatgccacaagccgtgtttttgcaag

SEQ ID NO: 4857 - DNA, 26 bp, Homo sapiens
atgccacaagccgtgtttttgcaagg

SEQ ID NO: 4858 - DNA, 26 bp, Homo sapiens
tgccacaagccgtgtttttgcaaggg

SEQ ID NO: 4859 - DNA, 26 bp, Homo sapiens
gccacaagccgtgtttttgcaagggc

SEQ ID NO: 4860 - DNA, 26 bp, Homo sapiens
ccacaagccgtgtttttgcaagggct

SEQ ID NO: 4861 - DNA, 26 bp, Homo sapiens
cacaagccgtgtttttgcaagggctc

SEQ ID NO: 4862 - DNA, 26 bp, Homo sapiens
acaagccgtgtttttgcaagggctcc

SEQ ID NO: 4863 - DNA, 26 bp, Homo sapiens
caagccgtgtttttgcaagggctcca

SEQ ID NO: 4864 - DNA, 26 bp, Homo sapiens
aagccgtgtttttgcaagggctccag

SEQ ID NO: 4865 - DNA, 26 bp, Homo sapiens
agccgtgtttttgcaagggctccagt

SEQ ID NO: 4866 - DNA, 26 bp, Homo sapiens
gccgtgtttttgcaagggctccagtt

SEQ ID NO: 4867 - DNA, 26 bp, Homo sapiens
ccgtgtttttgcaagggctccagttt

SEQ ID NO: 4868 - DNA, 26 bp, Homo sapiens
cgtgtttttgcaagggctccagtttg

SEQ ID NO: 4869 - DNA, 26 bp, Homo sapiens
gtgtttttgcaagggctccagtttgg

SEQ ID NO: 4870 - DNA, 26 bp, Homo sapiens
tgtttttgcaagggctccagtttggg

SEQ ID NO: 4871 - DNA, 26 bp, Homo sapiens
gtttttgcaagggctccagtttgggc

SEQ ID NO: 4872 - DNA, 26 bp, Homo sapiens
tttttgcaagggctccagtttgggca

SEQ ID NO: 4873 - DNA, 26 bp, Homo sapiens
ttttgcaagggctccagtttgggcat

SEQ ID NO: 4874 - DNA, 26 bp, Homo sapiens
tttgcaagggctccagtttgggcatt

SEQ ID NO: 4875 - DNA, 26 bp, Homo sapiens
ttgcaagggctccagtttgggcattt

SEQ ID NO: 4876 - DNA, 26 bp, Homo sapiens
tgcaagggctccagtttgggcatttt

SEQ ID NO: 4877 - DNA, 26 bp, Homo sapiens
gcaagggctccagtttgggcattttg

SEQ ID NO: 4878 - DNA, 26 bp, Homo sapiens
caagggctccagtttgggcattttgt

SEQ ID NO: 4879 - DNA, 26 bp, Homo sapiens
aagggctccagtttgggcattttgtc

SEQ ID NO: 4880 - DNA, 26 bp, Homo sapiens
agggctccagtttgggcattttgtcc

SEQ ID NO: 4881 - DNA, 26 bp, Homo sapiens
gggctccagtttgggcattttgtccg

SEQ ID NO: 4882 - DNA, 26 bp, Homo sapiens
ggctccagtttgggcattttgtccgt

SEQ ID NO: 4883 - DNA, 26 bp, Homo sapiens
gctccagtttgggcattttgtccgtg

SEQ ID NO: 4884 - DNA, 26 bp, Homo sapiens
ctccagtttgggcattttgtccgtgt

SEQ ID NO: 4885 - DNA, 26 bp, Homo sapiens
tccagtttgggcattttgtccgtgtg

SEQ ID NO: 4886 - DNA, 26 bp, Homo sapiens
ccagtttgggcattttgtccgtgtgc

SEQ ID NO: 4887 - DNA, 26 bp, Homo sapiens
cagtttgggcattttgtccgtgtgcg

SEQ ID NO: 4888 - DNA, 26 bp, Homo sapiens
agtttgggcattttgtccgtgtgcgc

SEQ ID NO: 4889 - DNA, 26 bp, Homo sapiens
gtttgggcattttgtccgtgtgcgcg

SEQ ID NO: 4890 - DNA, 26 bp, Homo sapiens
tttgggcattttgtccgtgtgcgcgt

SEQ ID NO: 4891 - DNA, 26 bp, Homo sapiens
ttgggcattttgtccgtgtgcgcgta

SEQ ID NO: 4892 - DNA, 26 bp, Homo sapiens
tgggcattttgtccgtgtgcgcgtaa

SEQ ID NO: 4893 - DNA, 26 bp, Homo sapiens
gggcattttgtccgtgtgcgcgtaaa

SEQ ID NO: 4894 - DNA, 26 bp, Homo sapiens
ggcattttgtccgtgtgcgcgtaaag

SEQ ID NO: 4895 - DNA, 26 bp, Homo sapiens
gcattttgtccgtgtgcgcgtaaagc

SEQ ID NO: 4896 - DNA, 26 bp, Homo sapiens
cattttgtccgtgtgcgcgtaaagct

SEQ ID NO: 4897 - DNA, 26 bp, Homo sapiens
attttgtccgtgtgcgcgtaaagctt

SEQ ID NO: 4898 - DNA, 26 bp, Homo sapiens
ttttgtccgtgtgcgcgtaaagcttc

SEQ ID NO: 4899 - DNA, 26 bp, Homo sapiens
tttgtccgtgtgcgcgtaaagcttca

SEQ ID NO: 4900 - DNA, 26 bp, Homo sapiens
ttgtccgtgtgcgcgtaaagcttcac

SEQ ID NO: 4901 - DNA, 26 bp, Homo sapiens
tgtccgtgtgcgcgtaaagcttcaca

SEQ ID NO: 4902 - DNA, 26 bp, Homo sapiens
gtccgtgtgcgcgtaaagcttcacac

SEQ ID NO: 4903 - DNA, 26 bp, Homo sapiens
tccgtgtgcgcgtaaagcttcacaca

SEQ ID NO: 4904 - DNA, 26 bp, Homo sapiens
ccgtgtgcgcgtaaagcttcacacag

SEQ ID NO: 4905 - DNA, 26 bp, Homo sapiens
cgtgtgcgcgtaaagcttcacacaga

SEQ ID NO: 4906 - DNA, 26 bp, Homo sapiens
gtgtgcgcgtaaagcttcacacagag

SEQ ID NO: 4907 - DNA, 26 bp, Homo sapiens
tgtgcgcgtaaagcttcacacagagg

SEQ ID NO: 4908 - DNA, 26 bp, Homo sapiens
gtgcgcgtaaagcttcacacagaggt

SEQ ID NO: 4909 - DNA, 26 bp, Homo sapiens
tgcgcgtaaagcttcacacagaggtt

SEQ ID NO: 4910 - DNA, 26 bp, Homo sapiens
gcgcgtaaagcttcacacagaggttc

SEQ ID NO: 4911 - DNA, 26 bp, Homo sapiens
cgcgtaaagcttcacacagaggttcg

SEQ ID NO: 4912 - DNA, 26 bp, Homo sapiens
gcgtaaagcttcacacagaggttcgg

SEQ ID NO: 4913 - DNA, 26 bp, Homo sapiens
cgtaaagcttcacacagaggttcggg

SEQ ID NO: 4914 - DNA, 26 bp, Homo sapiens
gtaaagcttcacacagaggttcgggc

SEQ ID NO: 4915 - DNA, 26 bp, Homo sapiens
taaagcttcacacagaggttcgggca

SEQ ID NO: 4916 - DNA, 26 bp, Homo sapiens
aaagcttcacacagaggttcgggcag

SEQ ID NO: 4917 - DNA, 26 bp, Homo sapiens
aagcttcacacagaggttcgggcagc

SEQ ID NO: 4918 - DNA, 26 bp, Homo sapiens
agcttcacacagaggttcgggcagcg

SEQ ID NO: 4919 - DNA, 26 bp, Homo sapiens
gcttcacacagaggttcgggcagcgg

SEQ ID NO: 4920 - DNA, 26 bp, Homo sapiens
cttcacacagaggttcgggcagcggc

SEQ ID NO: 4921 - DNA, 26 bp, Homo sapiens
ttcacacagaggttcgggcagcggct

SEQ ID NO: 4922 - DNA, 26 bp, Homo sapiens
tcacacagaggttcgggcagcggctg

SEQ ID NO: 4923 - DNA, 26 bp, Homo sapiens
cacacagaggttcgggcagcggctgt

SEQ ID NO: 4924 - DNA, 26 bp, Homo sapiens
acacagaggttcgggcagcggctgtt

SEQ ID NO: 4925 - DNA, 26 bp, Homo sapiens
cacagaggttcgggcagcggctgttt

SEQ ID NO: 4926 - DNA, 26 bp, Homo sapiens
acagaggttcgggcagcggctgtttc

SEQ ID NO: 4927 - DNA, 26 bp, Homo sapiens
cagaggttcgggcagcggctgtttct

SEQ ID NO: 4928 - DNA, 26 bp, Homo sapiens
agaggttcgggcagcggctgtttctg

SEQ ID NO: 4929 - DNA, 26 bp, Homo sapiens
gaggttcgggcagcggctgtttctgt

SEQ ID NO: 4930 - DNA, 26 bp, Homo sapiens
aggttcgggcagcggctgtttctgtt

SEQ ID NO: 4931 - DNA, 26 bp, Homo sapiens
ggttcgggcagcggctgtttctgttg

SEQ ID NO: 4932 - DNA, 26 bp, Homo sapiens
gttcgggcagcggctgtttctgttgg

SEQ ID NO: 4933 - DNA, 26 bp, Homo sapiens
ttcgggcagcggctgtttctgttgga

SEQ ID NO: 4934 - DNA, 26 bp, Homo sapiens
tcgggcagcggctgtttctgttggat

SEQ ID NO: 4935 - DNA, 26 bp, Homo sapiens
cgggcagcggctgtttctgttggatg

SEQ ID NO: 4936 - DNA, 26 bp, Homo sapiens
gggcagcggctgtttctgttggatgc

SEQ ID NO: 4937 - DNA, 26 bp, Homo sapiens
ggcagcggctgtttctgttggatgca

SEQ ID NO: 4938 - DNA, 26 bp, Homo sapiens
gcagcggctgtttctgttggatgcac

SEQ ID NO: 4939 - DNA, 26 bp, Homo sapiens
cagcggctgtttctgttggatgcact

SEQ ID NO: 4940 - DNA, 26 bp, Homo sapiens
agcggctgtttctgttggatgcactg

SEQ ID NO: 4941 - DNA, 26 bp, Homo sapiens
gcggctgtttctgttggatgcactgg

SEQ ID NO: 4942 - DNA, 26 bp, Homo sapiens
cggctgtttctgttggatgcactggg

SEQ ID NO: 4943 - DNA, 26 bp, Homo sapiens
ggctgtttctgttggatgcactgggt

SEQ ID NO: 4944 - DNA, 26 bp, Homo sapiens
gctgtttctgttggatgcactgggtc

SEQ ID NO: 4945 - DNA, 26 bp, Homo sapiens
ctgtttctgttggatgcactgggtca

SEQ ID NO: 4946 - DNA, 26 bp, Homo sapiens
tgtttctgttggatgcactgggtcac

SEQ ID NO: 4947 - DNA, 26 bp, Homo sapiens
gtttctgttggatgcactgggtcacc

SEQ ID NO: 4948 - DNA, 26 bp, Homo sapiens
tttctgttggatgcactgggtcaccc

SEQ ID NO: 4949 - DNA, 26 bp, Homo sapiens
ttctgttggatgcactgggtcaccca

SEQ ID NO: 4950 - DNA, 26 bp, Homo sapiens
tctgttggatgcactgggtcacccac

SEQ ID NO: 4951 - DNA, 26 bp, Homo sapiens
ctgttggatgcactgggtcacccacc

SEQ ID NO: 4952 - DNA, 26 bp, Homo sapiens
tgttggatgcactgggtcacccacca

SEQ ID NO: 4953 - DNA, 26 bp, Homo sapiens
gttggatgcactgggtcacccaccag

SEQ ID NO: 4954 - DNA, 26 bp, Homo sapiens
ttggatgcactgggtcacccaccaga

SEQ ID NO: 4955 - DNA, 26 bp, Homo sapiens
tggatgcactgggtcacccaccagaa

SEQ ID NO: 4956 - DNA, 26 bp, Homo sapiens
ggatgcactgggtcacccaccagaaa

SEQ ID NO: 4957 - DNA, 26 bp, Homo sapiens
gatgcactgggtcacccaccagaaaa

SEQ ID NO: 4958 - DNA, 26 bp, Homo sapiens
atgcactgggtcacccaccagaaaag

SEQ ID NO: 4959 - DNA, 26 bp, Homo sapiens
tgcactgggtcacccaccagaaaagg

SEQ ID NO: 4960 - DNA, 26 bp, Homo sapiens
gcactgggtcacccaccagaaaaggg

SEQ ID NO: 4961 - DNA, 26 bp, Homo sapiens
cactgggtcacccaccagaaaagggc

SEQ ID NO: 4962 - DNA, 26 bp, Homo sapiens
actgggtcacccaccagaaaagggct

SEQ ID NO: 4963 - DNA, 26 bp, Homo sapiens
ctgggtcacccaccagaaaagggctt

SEQ ID NO: 4964 - DNA, 26 bp, Homo sapiens
tgggtcacccaccagaaaagggcttt

SEQ ID NO: 4965 - DNA, 26 bp, Homo sapiens
gggtcacccaccagaaaagggctttt

SEQ ID NO: 4966 - DNA, 26 bp, Homo sapiens
ggtcacccaccagaaaagggcttttg

SEQ ID NO: 4967 - DNA, 26 bp, Homo sapiens
gtcacccaccagaaaagggcttttgg

SEQ ID NO: 4968 - DNA, 26 bp, Homo sapiens
tcacccaccagaaaagggcttttgga

SEQ ID NO: 4969 - DNA, 26 bp, Homo sapiens
cacccaccagaaaagggcttttggac

SEQ ID NO: 4970 - DNA, 26 bp, Homo sapiens
acccaccagaaaagggcttttggaca

SEQ ID NO: 4971 - DNA, 26 bp, Homo sapiens
cccaccagaaaagggcttttggacat

SEQ ID NO: 4972 - DNA, 26 bp, Homo sapiens
ccaccagaaaagggcttttggacatt

SEQ ID NO: 4973 - DNA, 26 bp, Homo sapiens
caccagaaaagggcttttggacattt

SEQ ID NO: 4974 - DNA, 26 bp, Homo sapiens
accagaaaagggcttttggacatttg

SEQ ID NO: 4975 - DNA, 26 bp, Homo sapiens
ccagaaaagggcttttggacatttgg

SEQ ID NO: 4976 - DNA, 26 bp, Homo sapiens
cagaaaagggcttttggacatttggg

SEQ ID NO: 4977 - DNA, 26 bp, Homo sapiens
agaaaagggcttttggacatttgggg

SEQ ID NO: 4978 - DNA, 26 bp, Homo sapiens
gaaaagggcttttggacatttggggt

SEQ ID NO: 4979 - DNA, 26 bp, Homo sapiens
aaaagggcttttggacatttggggtt

SEQ ID NO: 4980 - DNA, 26 bp, Homo sapiens
aaagggcttttggacatttggggttt

SEQ ID NO: 4981 - DNA, 26 bp, Homo sapiens
aagggcttttggacatttggggtttc

SEQ ID NO: 4982 - DNA, 26 bp, Homo sapiens
agggcttttggacatttggggtttct

SEQ ID NO: 4983 - DNA, 26 bp, Homo sapiens
gggcttttggacatttggggtttcta

SEQ ID NO: 4984 - DNA, 26 bp, Homo sapiens
ggcttttggacatttggggtttctac

SEQ ID NO: 4985 - DNA, 26 bp, Homo sapiens
gcttttggacatttggggtttctacc

SEQ ID NO: 4986 - DNA, 26 bp, Homo sapiens
cttttggacatttggggtttctaccc

SEQ ID NO: 4987 - DNA, 26 bp, Homo sapiens
ttttggacatttggggtttctaccca

SEQ ID NO: 4988 - DNA, 26 bp, Homo sapiens
tttggacatttggggtttctacccac

SEQ ID NO: 4989 - DNA, 26 bp, Homo sapiens
ttggacatttggggtttctacccaca

SEQ ID NO: 4990 - DNA, 26 bp, Homo sapiens
tggacatttggggtttctacccacac

SEQ ID NO: 4991 - DNA, 26 bp, Homo sapiens
ggacatttggggtttctacccacact

SEQ ID NO: 4992 - DNA, 26 bp, Homo sapiens
gacatttggggtttctacccacactt

SEQ ID NO: 4993 - DNA, 26 bp, Homo sapiens
acatttggggtttctacccacacttt

SEQ ID NO: 4994 - DNA, 26 bp, Homo sapiens
catttggggtttctacccacactttg

SEQ ID NO: 4995 - DNA, 26 bp, Homo sapiens
atttggggtttctacccacactttgg

SEQ ID NO: 4996 - DNA, 26 bp, Homo sapiens
tttggggtttctacccacactttggt

SEQ ID NO: 4997 - DNA, 26 bp, Homo sapiens
ttggggtttctacccacactttggtt

SEQ ID NO: 4998 - DNA, 26 bp, Homo sapiens
tggggtttctacccacactttggttt

SEQ ID NO: 4999 - DNA, 26 bp, Homo sapiens
ggggtttctacccacactttggtttt

SEQ ID NO: 5000 - DNA, 26 bp, Homo sapiens
gggtttctacccacactttggttttc

SEQ ID NO: 5001 - DNA, 26 bp, Homo sapiens
ggtttctacccacactttggttttct

SEQ ID NO: 5002 - DNA, 26 bp, Homo sapiens
gtttctacccacactttggttttcta

SEQ ID NO: 5003 - DNA, 26 bp, Homo sapiens
tttctacccacactttggttttctaa

SEQ ID NO: 5004 - DNA, 26 bp, Homo sapiens
ttctacccacactttggttttctaaa

SEQ ID NO: 5005 - DNA, 26 bp, Homo sapiens
tctacccacactttggttttctaaat

SEQ ID NO: 5006 - DNA, 26 bp, Homo sapiens
ctacccacactttggttttctaaatg

SEQ ID NO: 5007 - DNA, 26 bp, Homo sapiens
tacccacactttggttttctaaatga

SEQ ID NO: 5008 - DNA, 26 bp, Homo sapiens
acccacactttggttttctaaatgag

SEQ ID NO: 5009 - DNA, 26 bp, Homo sapiens
cccacactttggttttctaaatgagg

SEQ ID NO: 5010 - DNA, 26 bp, Homo sapiens
ccacactttggttttctaaatgaggt

SEQ ID NO: 5011 - DNA, 26 bp, Homo sapiens
cacactttggttttctaaatgaggtg

SEQ ID NO: 5012 - DNA, 26 bp, Homo sapiens
acactttggttttctaaatgaggtgg

SEQ ID NO: 5013 - DNA, 26 bp, Homo sapiens
cactttggttttctaaatgaggtgga

SEQ ID NO: 5014 - DNA, 26 bp, Homo sapiens
actttggttttctaaatgaggtggac

SEQ ID NO: 5015 - DNA, 26 bp, Homo sapiens
ctttggttttctaaatgaggtggact

SEQ ID NO: 5016 - DNA, 26 bp, Homo sapiens
tttggttttctaaatgaggtggactg

SEQ ID NO: 5017 - DNA, 26 bp, Homo sapiens
ttggttttctaaatgaggtggactgg

SEQ ID NO: 5018 - DNA, 26 bp, Homo sapiens
tggttttctaaatgaggtggactggg

SEQ ID NO: 5019 - DNA, 26 bp, Homo sapiens
ggttttctaaatgaggtggactggga

SEQ ID NO: 5020 - DNA, 26 bp, Homo sapiens
gttttctaaatgaggtggactgggag

SEQ ID NO: 5021 - DNA, 26 bp, Homo sapiens
ttttctaaatgaggtggactgggagg

SEQ ID NO: 5022 - DNA, 26 bp, Homo sapiens
tttctaaatgaggtggactgggaggg

SEQ ID NO: 5023 - DNA, 26 bp, Homo sapiens
ttctaaatgaggtggactgggaggga

SEQ ID NO: 5024 - DNA, 26 bp, Homo sapiens
tctaaatgaggtggactgggagggag

SEQ ID NO: 5025 - DNA, 26 bp, Homo sapiens
ctaaatgaggtggactgggagggagg

SEQ ID NO: 5026 - DNA, 26 bp, Homo sapiens
taaatgaggtggactgggagggaggt

SEQ ID NO: 5027 - DNA, 26 bp, Homo sapiens
aaatgaggtggactgggagggaggta

SEQ ID NO: 5028 - DNA, 26 bp, Homo sapiens
aatgaggtggactgggagggaggtat

SEQ ID NO: 5029 - DNA, 26 bp, Homo sapiens
atgaggtggactgggagggaggtatc

SEQ ID NO: 5030 - DNA, 26 bp, Homo sapiens
tgaggtggactgggagggaggtatct

SEQ ID NO: 5031 - DNA, 26 bp, Homo sapiens
gaggtggactgggagggaggtatctt

SEQ ID NO: 5032 - DNA, 26 bp, Homo sapiens
aggtggactgggagggaggtatcttc

SEQ ID NO: 5033 - DNA, 26 bp, Homo sapiens
ggtggactgggagggaggtatcttct

SEQ ID NO: 5034 - DNA, 26 bp, Homo sapiens
gtggactgggagggaggtatcttctt

SEQ ID NO: 5035 - DNA, 26 bp, Homo sapiens
tggactgggagggaggtatcttcttt

SEQ ID NO: 5036 - DNA, 26 bp, Homo sapiens
ggactgggagggaggtatcttctttc

SEQ ID NO: 5037 - DNA, 26 bp, Homo sapiens
gactgggagggaggtatcttctttca

SEQ ID NO: 5038 - DNA, 26 bp, Homo sapiens
actgggagggaggtatcttctttcag

SEQ ID NO: 5039 - DNA, 26 bp, Homo sapiens
ctgggagggaggtatcttctttcaga

SEQ ID NO: 5040 - DNA, 26 bp, Homo sapiens
tgggagggaggtatcttctttcagat

SEQ ID NO: 5041 - DNA, 26 bp, Homo sapiens
gggagggaggtatcttctttcagatg

SEQ ID NO: 5042 - DNA, 26 bp, Homo sapiens
ggagggaggtatcttctttcagatga

SEQ ID NO: 5043 - DNA, 26 bp, Homo sapiens
gagggaggtatcttctttcagatgaa

SEQ ID NO: 5044 - DNA, 26 bp, Homo sapiens
agggaggtatcttctttcagatgaaa

SEQ ID NO: 5045 - DNA, 26 bp, Homo sapiens
gggaggtatcttctttcagatgaaag

SEQ ID NO: 5046 - DNA, 26 bp, Homo sapiens
ggaggtatcttctttcagatgaaagg

SEQ ID NO: 5047 - DNA, 26 bp, Homo sapiens
gaggtatcttctttcagatgaaaggg

SEQ ID NO: 5048 - DNA, 26 bp, Homo sapiens
aggtatcttctttcagatgaaaggga

SEQ ID NO: 5049 - DNA, 26 bp, Homo sapiens
ggtatcttctttcagatgaaagggaa

SEQ ID NO: 5050 - DNA, 26 bp, Homo sapiens
gtatcttctttcagatgaaagggaag

SEQ ID NO: 5051 - DNA, 26 bp, Homo sapiens
tatcttctttcagatgaaagggaagg

SEQ ID NO: 5052 - DNA, 26 bp, Homo sapiens
atcttctttcagatgaaagggaaggg

SEQ ID NO: 5053 - DNA, 26 bp, Homo sapiens
tcttctttcagatgaaagggaagggg

SEQ ID NO: 5054 - DNA, 26 bp, Homo sapiens
cttctttcagatgaaagggaaggggc

SEQ ID NO: 5055 - DNA, 26 bp, Homo sapiens
ttctttcagatgaaagggaaggggcg

SEQ ID NO: 5056 - DNA, 26 bp, Homo sapiens
tctttcagatgaaagggaaggggcga

SEQ ID NO: 5057 - DNA, 26 bp, Homo sapiens
ctttcagatgaaagggaaggggcgag

SEQ ID NO: 5058 - DNA, 26 bp, Homo sapiens
tttcagatgaaagggaaggggcgaga

SEQ ID NO: 5059 - DNA, 26 bp, Homo sapiens
ttcagatgaaagggaaggggcgagat

SEQ ID NO: 5060 - DNA, 26 bp, Homo sapiens
tcagatgaaagggaaggggcgagatg

SEQ ID NO: 5061 - DNA, 26 bp, Homo sapiens
cagatgaaagggaaggggcgagatgg

SEQ ID NO: 5062 - DNA, 26 bp, Homo sapiens
agatgaaagggaaggggcgagatgga

SEQ ID NO: 5063 - DNA, 26 bp, Homo sapiens
gatgaaagggaaggggcgagatggag

SEQ ID NO: 5064 - DNA, 26 bp, Homo sapiens
atgaaagggaaggggcgagatggagt

SEQ ID NO: 5065 - DNA, 26 bp, Homo sapiens
tgaaagggaaggggcgagatggagtt

SEQ ID NO: 5066 - DNA, 26 bp, Homo sapiens
gaaagggaaggggcgagatggagtta

SEQ ID NO: 5067 - DNA, 26 bp, Homo sapiens
aaagggaaggggcgagatggagttat

SEQ ID NO: 5068 - DNA, 26 bp, Homo sapiens
aagggaaggggcgagatggagttatc

SEQ ID NO: 5069 - DNA, 26 bp, Homo sapiens
agggaaggggcgagatggagttatct

SEQ ID NO: 5070 - DNA, 26 bp, Homo sapiens
gggaaggggcgagatggagttatctt

SEQ ID NO: 5071 - DNA, 26 bp, Homo sapiens
ggaaggggcgagatggagttatctta

SEQ ID NO: 5072 - DNA, 26 bp, Homo sapiens
gaaggggcgagatggagttatcttat

SEQ ID NO: 5073 - DNA, 26 bp, Homo sapiens
aaggggcgagatggagttatcttatt

SEQ ID NO: 5074 - DNA, 26 bp, Homo sapiens
aggggcgagatggagttatcttattt

SEQ ID NO: 5075 - DNA, 26 bp, Homo sapiens
ggggcgagatggagttatcttatttc

SEQ ID NO: 5076 - DNA, 26 bp, Homo sapiens
gggcgagatggagttatcttatttct

SEQ ID NO: 5077 - DNA, 26 bp, Homo sapiens
ggcgagatggagttatcttatttctg

SEQ ID NO: 5078 - DNA, 26 bp, Homo sapiens
gcgagatggagttatcttatttctgg

SEQ ID NO: 5079 - DNA, 26 bp, Homo sapiens
cgagatggagttatcttatttctggg

SEQ ID NO: 5080 - DNA, 26 bp, Homo sapiens
gagatggagttatcttatttctgggt

SEQ ID NO: 5081 - DNA, 26 bp, Homo sapiens
agatggagttatcttatttctgggta

SEQ ID NO: 5082 - DNA, 26 bp, Homo sapiens
gatggagttatcttatttctgggtaa

SEQ ID NO: 5083 - DNA, 26 bp, Homo sapiens
atggagttatcttatttctgggtaaa

SEQ ID NO: 5084 - DNA, 26 bp, Homo sapiens
tggagttatcttatttctgggtaaaa

SEQ ID NO: 5085 - DNA, 26 bp, Homo sapiens
ggagttatcttatttctgggtaaaac

SEQ ID NO: 5086 - DNA, 26 bp, Homo sapiens
gagttatcttatttctgggtaaaaca

SEQ ID NO: 5087 - DNA, 26 bp, Homo sapiens
agttatcttatttctgggtaaaacaa

SEQ ID NO: 5088 - DNA, 26 bp, Homo sapiens
gttatcttatttctgggtaaaacaaa

SEQ ID NO: 5089 - DNA, 26 bp, Homo sapiens
ttatcttatttctgggtaaaacaaaa

SEQ ID NO: 5090 - DNA, 26 bp, Homo sapiens
tatcttatttctgggtaaaacaaaac

SEQ ID NO: 5091 - DNA, 26 bp, Homo sapiens
atcttatttctgggtaaaacaaaaca

SEQ ID NO: 5092 - DNA, 26 bp, Homo sapiens
tcttatttctgggtaaaacaaaacaa

SEQ ID NO: 5093 - DNA, 26 bp, Homo sapiens
cttatttctgggtaaaacaaaacaaa

SEQ ID NO: 5094 - DNA, 26 bp, Homo sapiens
ttatttctgggtaaaacaaaacaaac

SEQ ID NO: 5095 - DNA, 26 bp, Homo sapiens
tatttctgggtaaaacaaaacaaaca

SEQ ID NO: 5096 - DNA, 26 bp, Homo sapiens
atttctgggtaaaacaaaacaaacaa

SEQ ID NO: 5097 - DNA, 26 bp, Homo sapiens
tttctgggtaaaacaaaacaaacaaa

SEQ ID NO: 5098 - DNA, 26 bp, Homo sapiens
ttctgggtaaaacaaaacaaacaaac

SEQ ID NO: 5099 - DNA, 26 bp, Homo sapiens
tctgggtaaaacaaaacaaacaaaca

SEQ ID NO: 5100 - DNA, 26 bp, Homo sapiens
ctgggtaaaacaaaacaaacaaacaa

SEQ ID NO: 5101 - DNA, 26 bp, Homo sapiens
tgggtaaaacaaaacaaacaaacaaa

SEQ ID NO: 5102 - DNA, 26 bp, Homo sapiens
gggtaaaacaaaacaaacaaacaaaa

SEQ ID NO: 5103 - DNA, 26 bp, Homo sapiens
ggtaaaacaaaacaaacaaacaaaaa

SEQ ID NO: 5104 - DNA, 26 bp, Homo sapiens
gtaaaacaaaacaaacaaacaaaaaa

SEQ ID NO: 5105 - DNA, 26 bp, Homo sapiens
taaaacaaaacaaacaaacaaaaaac

SEQ ID NO: 5106 - DNA, 26 bp, Homo sapiens
aaaacaaaacaaacaaacaaaaaaca

SEQ ID NO: 5107 - DNA, 26 bp, Homo sapiens
aaacaaaacaaacaaacaaaaaacaa

SEQ ID NO: 5108 - DNA, 26 bp, Homo sapiens
aacaaaacaaacaaacaaaaaacaaa

SEQ ID NO: 5109 - DNA, 26 bp, Homo sapiens
acaaaacaaacaaacaaaaaacaaaa

SEQ ID NO: 5110 - DNA, 26 bp, Homo sapiens
caaaacaaacaaacaaaaaacaaaac

SEQ ID NO: 5111 - DNA, 26 bp, Homo sapiens
aaaacaaacaaacaaaaaacaaaaca

SEQ ID NO: 5112 - DNA, 26 bp, Homo sapiens
aaacaaacaaacaaaaaacaaaacaa

SEQ ID NO: 5113 - DNA, 26 bp, Homo sapiens
aacaaacaaacaaaaaacaaaacaaa

SEQ ID NO: 5114 - DNA, 26 bp, Homo sapiens
acaaacaaacaaaaaacaaaacaaaa

SEQ ID NO: 5115 - DNA, 26 bp, Homo sapiens
caaacaaacaaaaaacaaaacaaaaa

SEQ ID NO: 5116 - DNA, 26 bp, Homo sapiens
aaacaaacaaaaaacaaaacaaaaat

SEQ ID NO: 5117 - DNA, 26 bp, Homo sapiens
aacaaacaaaaaacaaaacaaaaata

SEQ ID NO: 5118 - DNA, 26 bp, Homo sapiens
acaaacaaaaaacaaaacaaaaatac

SEQ ID NO: 5119 - DNA, 26 bp, Homo sapiens
caaacaaaaaacaaaacaaaaatact

SEQ ID NO: 5120 - DNA, 26 bp, Homo sapiens
aaacaaaaaacaaaacaaaaatactg

SEQ ID NO: 5121 - DNA, 26 bp, Homo sapiens
aacaaaaaacaaaacaaaaatactga

SEQ ID NO: 5122 - DNA, 26 bp, Homo sapiens
acaaaaaacaaaacaaaaatactgag

SEQ ID NO: 5123 - DNA, 26 bp, Homo sapiens
caaaaaacaaaacaaaaatactgagc

SEQ ID NO: 5124 - DNA, 26 bp, Homo sapiens
aaaaaacaaaacaaaaatactgagct

SEQ ID NO: 5125 - DNA, 26 bp, Homo sapiens
aaaaacaaaacaaaaatactgagctg

SEQ ID NO: 5126 - DNA, 26 bp, Homo sapiens
aaaacaaaacaaaaatactgagctgg

SEQ ID NO: 5127 - DNA, 26 bp, Homo sapiens
aaacaaaacaaaaatactgagctgga

SEQ ID NO: 5128 - DNA, 26 bp, Homo sapiens
aacaaaacaaaaatactgagctggat

SEQ ID NO: 5129 - DNA, 26 bp, Homo sapiens
acaaaacaaaaatactgagctggatt

SEQ ID NO: 5130 - DNA, 26 bp, Homo sapiens
caaaacaaaaatactgagctggatta

SEQ ID NO: 5131 - DNA, 26 bp, Homo sapiens
aaaacaaaaatactgagctggattat

SEQ ID NO: 5132 - DNA, 26 bp, Homo sapiens
aaacaaaaatactgagctggattata

SEQ ID NO: 5133 - DNA, 26 bp, Homo sapiens
aacaaaaatactgagctggattatac

SEQ ID NO: 5134 - DNA, 26 bp, Homo sapiens
acaaaaatactgagctggattatact

SEQ ID NO: 5135 - DNA, 26 bp, Homo sapiens
caaaaatactgagctggattatactg

SEQ ID NO: 5136 - DNA, 26 bp, Homo sapiens
aaaaatactgagctggattatactgt

SEQ ID NO: 5137 - DNA, 26 bp, Homo sapiens
aaaatactgagctggattatactgtt

SEQ ID NO: 5138 - DNA, 26 bp, Homo sapiens
aaatactgagctggattatactgtta

SEQ ID NO: 5139 - DNA, 26 bp, Homo sapiens
aatactgagctggattatactgttag

SEQ ID NO: 5140 - DNA, 26 bp, Homo sapiens
atactgagctggattatactgttagg

SEQ ID NO: 5141 - DNA, 26 bp, Homo sapiens
tactgagctggattatactgttagga

SEQ ID NO: 5142 - DNA, 26 bp, Homo sapiens
actgagctggattatactgttaggat

SEQ ID NO: 5143 - DNA, 26 bp, Homo sapiens
ctgagctggattatactgttaggatg

SEQ ID NO: 5144 - DNA, 26 bp, Homo sapiens
tgagctggattatactgttaggatgt

SEQ ID NO: 5145 - DNA, 26 bp, Homo sapiens
gagctggattatactgttaggatgta

SEQ ID NO: 5146 - DNA, 26 bp, Homo sapiens
agctggattatactgttaggatgtaa

SEQ ID NO: 5147 - DNA, 26 bp, Homo sapiens
gctggattatactgttaggatgtaaa

SEQ ID NO: 5148 - DNA, 26 bp, Homo sapiens
ctggattatactgttaggatgtaaag

SEQ ID NO: 5149 - DNA, 26 bp, Homo sapiens
tggattatactgttaggatgtaaagt

SEQ ID NO: 5150 - DNA, 26 bp, Homo sapiens
ggattatactgttaggatgtaaagtt

SEQ ID NO: 5151 - DNA, 26 bp, Homo sapiens
gattatactgttaggatgtaaagttc

SEQ ID NO: 5152 - DNA, 26 bp, Homo sapiens
attatactgttaggatgtaaagttcc

SEQ ID NO: 5153 - DNA, 26 bp, Homo sapiens
ttatactgttaggatgtaaagttcct

SEQ ID NO: 5154 - DNA, 26 bp, Homo sapiens
tatactgttaggatgtaaagttcctt

SEQ ID NO: 5155 - DNA, 26 bp, Homo sapiens
atactgttaggatgtaaagttcctta

SEQ ID NO: 5156 - DNA, 26 bp, Homo sapiens
tactgttaggatgtaaagttccttag

SEQ ID NO: 5157 - DNA, 26 bp, Homo sapiens
actgttaggatgtaaagttccttagc

SEQ ID NO: 5158 - DNA, 26 bp, Homo sapiens
ctgttaggatgtaaagttccttagct

SEQ ID NO: 5159 - DNA, 26 bp, Homo sapiens
tgttaggatgtaaagttccttagcta

SEQ ID NO: 5160 - DNA, 26 bp, Homo sapiens
gttaggatgtaaagttccttagctac

SEQ ID NO: 5161 - DNA, 26 bp, Homo sapiens
ttaggatgtaaagttccttagctact

SEQ ID NO: 5162 - DNA, 26 bp, Homo sapiens
taggatgtaaagttccttagctactt

SEQ ID NO: 5163 - DNA, 26 bp, Homo sapiens
aggatgtaaagttccttagctacttc

SEQ ID NO: 5164 - DNA, 26 bp, Homo sapiens
ggatgtaaagttccttagctacttct

SEQ ID NO: 5165 - DNA, 26 bp, Homo sapiens
gatgtaaagttccttagctacttctt

SEQ ID NO: 5166 - DNA, 26 bp, Homo sapiens
atgtaaagttccttagctacttcttt

SEQ ID NO: 5167 - DNA, 26 bp, Homo sapiens
tgtaaagttccttagctacttcttta

SEQ ID NO: 5168 - DNA, 26 bp, Homo sapiens
gtaaagttccttagctacttctttaa

SEQ ID NO: 5169 - DNA, 26 bp, Homo sapiens
taaagttccttagctacttctttaag

SEQ ID NO: 5170 - DNA, 26 bp, Homo sapiens
aaagttccttagctacttctttaagg

SEQ ID NO: 5171 - DNA, 26 bp, Homo sapiens
aagttccttagctacttctttaaggc

SEQ ID NO: 5172 - DNA, 26 bp, Homo sapiens
agttccttagctacttctttaaggct

SEQ ID NO: 5173 - DNA, 26 bp, Homo sapiens
gttccttagctacttctttaaggctc

SEQ ID NO: 5174 - DNA, 26 bp, Homo sapiens
ttccttagctacttctttaaggctca

SEQ ID NO: 5175 - DNA, 26 bp, Homo sapiens
tccttagctacttctttaaggctcaa

SEQ ID NO: 5176 - DNA, 26 bp, Homo sapiens
ccttagctacttctttaaggctcaac

SEQ ID NO: 5177 - DNA, 26 bp, Homo sapiens
cttagctacttctttaaggctcaaca

SEQ ID NO: 5178 - DNA, 26 bp, Homo sapiens
ttagctacttctttaaggctcaacac

SEQ ID NO: 5179 - DNA, 26 bp, Homo sapiens
tagctacttctttaaggctcaacacg

SEQ ID NO: 5180 - DNA, 26 bp, Homo sapiens
agctacttctttaaggctcaacacga

SEQ ID NO: 5181 - DNA, 26 bp, Homo sapiens
gctacttctttaaggctcaacacgag

SEQ ID NO: 5182 - DNA, 26 bp, Homo sapiens
ctacttctttaaggctcaacacgagg

SEQ ID NO: 5183 - DNA, 26 bp, Homo sapiens
tacttctttaaggctcaacacgaggc

SEQ ID NO: 5184 - DNA, 26 bp, Homo sapiens
acttctttaaggctcaacacgaggct

SEQ ID NO: 5185 - DNA, 26 bp, Homo sapiens
cttctttaaggctcaacacgaggctg

SEQ ID NO: 5186 - DNA, 26 bp, Homo sapiens
ttctttaaggctcaacacgaggctga

SEQ ID NO: 5187 - DNA, 26 bp, Homo sapiens
tctttaaggctcaacacgaggctgat

SEQ ID NO: 5188 - DNA, 26 bp, Homo sapiens
ctttaaggctcaacacgaggctgatg

SEQ ID NO: 5189 - DNA, 26 bp, Homo sapiens
tttaaggctcaacacgaggctgatgg

SEQ ID NO: 5190 - DNA, 26 bp, Homo sapiens
ttaaggctcaacacgaggctgatggt

SEQ ID NO: 5191 - DNA, 26 bp, Homo sapiens
taaggctcaacacgaggctgatggtc

SEQ ID NO: 5192 - DNA, 26 bp, Homo sapiens
aaggctcaacacgaggctgatggtca

SEQ ID NO: 5193 - DNA, 26 bp, Homo sapiens
aggctcaacacgaggctgatggtcaa

SEQ ID NO: 5194 - DNA, 26 bp, Homo sapiens
ggctcaacacgaggctgatggtcaac

SEQ ID NO: 5195 - DNA, 26 bp, Homo sapiens
gctcaacacgaggctgatggtcaaca

SEQ ID NO: 5196 - DNA, 26 bp, Homo sapiens
ctcaacacgaggctgatggtcaacat

SEQ ID NO: 5197 - DNA, 26 bp, Homo sapiens
tcaacacgaggctgatggtcaacata

SEQ ID NO: 5198 - DNA, 26 bp, Homo sapiens
caacacgaggctgatggtcaacataa

SEQ ID NO: 5199 - DNA, 26 bp, Homo sapiens
aacacgaggctgatggtcaacataaa

SEQ ID NO: 5200 - DNA, 26 bp, Homo sapiens
acacgaggctgatggtcaacataaaa

SEQ ID NO: 5201 - DNA, 26 bp, Homo sapiens
cacgaggctgatggtcaacataaaaa

SEQ ID NO: 5202 - DNA, 26 bp, Homo sapiens
acgaggctgatggtcaacataaaaag

SEQ ID NO: 5203 - DNA, 26 bp, Homo sapiens
cgaggctgatggtcaacataaaaagc

SEQ ID NO: 5204 - DNA, 26 bp, Homo sapiens
gaggctgatggtcaacataaaaagca

SEQ ID NO: 5205 - DNA, 26 bp, Homo sapiens
aggctgatggtcaacataaaaagcaa

SEQ ID NO: 5206 - DNA, 26 bp, Homo sapiens
ggctgatggtcaacataaaaagcaaa

SEQ ID NO: 5207 - DNA, 26 bp, Homo sapiens
gctgatggtcaacataaaaagcaaac

SEQ ID NO: 5208 - DNA, 26 bp, Homo sapiens
ctgatggtcaacataaaaagcaaaca

SEQ ID NO: 5209 - DNA, 26 bp, Homo sapiens
tgatggtcaacataaaaagcaaacaa

SEQ ID NO: 5210 - DNA, 26 bp, Homo sapiens
gatggtcaacataaaaagcaaacaat

SEQ ID NO: 5211 - DNA, 26 bp, Homo sapiens
atggtcaacataaaaagcaaacaata

SEQ ID NO: 5212 - DNA, 26 bp, Homo sapiens
tggtcaacataaaaagcaaacaatac

SEQ ID NO: 5213 - DNA, 26 bp, Homo sapiens
ggtcaacataaaaagcaaacaatact

SEQ ID NO: 5214 - DNA, 26 bp, Homo sapiens
gtcaacataaaaagcaaacaatacta

SEQ ID NO: 5215 - DNA, 26 bp, Homo sapiens
tcaacataaaaagcaaacaatactat

SEQ ID NO: 5216 - DNA, 26 bp, Homo sapiens
caacataaaaagcaaacaatactatg

SEQ ID NO: 5217 - DNA, 26 bp, Homo sapiens
aacataaaaagcaaacaatactatgt

SEQ ID NO: 5218 - DNA, 26 bp, Homo sapiens
acataaaaagcaaacaatactatgta

SEQ ID NO: 5219 - DNA, 26 bp, Homo sapiens
cataaaaagcaaacaatactatgtac

SEQ ID NO: 5220 - DNA, 26 bp, Homo sapiens
ataaaaagcaaacaatactatgtaca

SEQ ID NO: 5221 - DNA, 26 bp, Homo sapiens
taaaaagcaaacaatactatgtacat

SEQ ID NO: 5222 - DNA, 26 bp, Homo sapiens
aaaaagcaaacaatactatgtacata

SEQ ID NO: 5223 - DNA, 26 bp, Homo sapiens
aaaagcaaacaatactatgtacatat

SEQ ID NO: 5224 - DNA, 26 bp, Homo sapiens
aaagcaaacaatactatgtacatata

SEQ ID NO: 5225 - DNA, 26 bp, Homo sapiens
aagcaaacaatactatgtacatatat

SEQ ID NO: 5226 - DNA, 26 bp, Homo sapiens
agcaaacaatactatgtacatatatg

SEQ ID NO: 5227 - DNA, 26 bp, Homo sapiens
gcaaacaatactatgtacatatatgt

SEQ ID NO: 5228 - DNA, 26 bp, Homo sapiens
caaacaatactatgtacatatatgta

SEQ ID NO: 5229 - DNA, 26 bp, Homo sapiens
aaacaatactatgtacatatatgtaa

SEQ ID NO: 5230 - DNA, 26 bp, Homo sapiens
aacaatactatgtacatatatgtaaa

SEQ ID NO: 5231 - DNA, 26 bp, Homo sapiens
acaatactatgtacatatatgtaaaa

SEQ ID NO: 5232 - DNA, 26 bp, Homo sapiens
caatactatgtacatatatgtaaaaa

SEQ ID NO: 5233 - DNA, 26 bp, Homo sapiens
aatactatgtacatatatgtaaaaag

SEQ ID NO: 5234 - DNA, 26 bp, Homo sapiens
atactatgtacatatatgtaaaaagt

SEQ ID NO: 5235 - DNA, 26 bp, Homo sapiens
tactatgtacatatatgtaaaaagtg

SEQ ID NO: 5236 - DNA, 26 bp, Homo sapiens
actatgtacatatatgtaaaaagtgt

SEQ ID NO: 5237 - DNA, 26 bp, Homo sapiens
ctatgtacatatatgtaaaaagtgtt

SEQ ID NO: 5238 - DNA, 26 bp, Homo sapiens
tatgtacatatatgtaaaaagtgtta

SEQ ID NO: 5239 - DNA, 26 bp, Homo sapiens
atgtacatatatgtaaaaagtgttat

SEQ ID NO: 5240 - DNA, 26 bp, Homo sapiens
tgtacatatatgtaaaaagtgttata

SEQ ID NO: 5241 - DNA, 26 bp, Homo sapiens
gtacatatatgtaaaaagtgttataa

SEQ ID NO: 5242 - DNA, 26 bp, Homo sapiens
tacatatatgtaaaaagtgttataaa

SEQ ID NO: 5243 - DNA, 26 bp, Homo sapiens
acatatatgtaaaaagtgttataaat

SEQ ID NO: 5244 - DNA, 26 bp, Homo sapiens
catatatgtaaaaagtgttataaata

SEQ ID NO: 5245 - DNA, 26 bp, Homo sapiens
atatatgtaaaaagtgttataaatag

SEQ ID NO: 5246 - DNA, 26 bp, Homo sapiens
tatatgtaaaaagtgttataaatagg

SEQ ID NO: 5247 - DNA, 26 bp, Homo sapiens
atatgtaaaaagtgttataaataggt

SEQ ID NO: 5248 - DNA, 26 bp, Homo sapiens
tatgtaaaaagtgttataaataggtt

SEQ ID NO: 5249 - DNA, 26 bp, Homo sapiens
atgtaaaaagtgttataaataggttt

SEQ ID NO: 5250 - DNA, 26 bp, Homo sapiens
tgtaaaaagtgttataaataggtttt

SEQ ID NO: 5251 - DNA, 26 bp, Homo sapiens
gtaaaaagtgttataaataggtttta

SEQ ID NO: 5252 - DNA, 26 bp, Homo sapiens
taaaaagtgttataaataggttttat

SEQ ID NO: 5253 - DNA, 26 bp, Homo sapiens
aaaaagtgttataaataggttttata

SEQ ID NO: 5254 - DNA, 26 bp, Homo sapiens
aaaagtgttataaataggttttataa

SEQ ID NO: 5255 - DNA, 26 bp, Homo sapiens
aaagtgttataaataggttttataaa

SEQ ID NO: 5256 - DNA, 26 bp, Homo sapiens
aagtgttataaataggttttataaac

SEQ ID NO: 5257 - DNA, 26 bp, Homo sapiens
agtgttataaataggttttataaacc

SEQ ID NO: 5258 - DNA, 26 bp, Homo sapiens
gtgttataaataggttttataaaccg

SEQ ID NO: 5259 - DNA, 26 bp, Homo sapiens
tgttataaataggttttataaaccgg

SEQ ID NO: 5260 - DNA, 26 bp, Homo sapiens
gttataaataggttttataaaccgga

SEQ ID NO: 5261 - DNA, 26 bp, Homo sapiens
ttataaataggttttataaaccggag

SEQ ID NO: 5262 - DNA, 26 bp, Homo sapiens
tataaataggttttataaaccggaga

SEQ ID NO: 5263 - DNA, 26 bp, Homo sapiens
ataaataggttttataaaccggagat

SEQ ID NO: 5264 - DNA, 26 bp, Homo sapiens
taaataggttttataaaccggagata

SEQ ID NO: 5265 - DNA, 26 bp, Homo sapiens
aaataggttttataaaccggagatat

SEQ ID NO: 5266 - DNA, 26 bp, Homo sapiens
aataggttttataaaccggagatatt

SEQ ID NO: 5267 - DNA, 26 bp, Homo sapiens
ataggttttataaaccggagatatta

SEQ ID NO: 5268 - DNA, 26 bp, Homo sapiens
taggttttataaaccggagatattat

SEQ ID NO: 5269 - DNA, 26 bp, Homo sapiens
aggttttataaaccggagatattata

SEQ ID NO: 5270 - DNA, 26 bp, Homo sapiens
ggttttataaaccggagatattatat

SEQ ID NO: 5271 - DNA, 26 bp, Homo sapiens
gttttataaaccggagatattatata

SEQ ID NO: 5272 - DNA, 26 bp, Homo sapiens
ttttataaaccggagatattatatac

SEQ ID NO: 5273 - DNA, 26 bp, Homo sapiens
tttataaaccggagatattatataca

SEQ ID NO: 5274 - DNA, 26 bp, Homo sapiens
ttataaaccggagatattatatacat

SEQ ID NO: 5275 - DNA, 26 bp, Homo sapiens
tataaaccggagatattatatacatc

SEQ ID NO: 5276 - DNA, 26 bp, Homo sapiens
ataaaccggagatattatatacatct

SEQ ID NO: 5277 - DNA, 26 bp, Homo sapiens
taaaccggagatattatatacatctt

SEQ ID NO: 5278 - DNA, 26 bp, Homo sapiens
aaaccggagatattatatacatcttc

SEQ ID NO: 5279 - DNA, 26 bp, Homo sapiens
aaccggagatattatatacatcttca

SEQ ID NO: 5280 - DNA, 26 bp, Homo sapiens
accggagatattatatacatcttcaa

SEQ ID NO: 5281 - DNA, 26 bp, Homo sapiens
ccggagatattatatacatcttcaat

SEQ ID NO: 5282 - DNA, 26 bp, Homo sapiens
cggagatattatatacatcttcaatc

SEQ ID NO: 5283 - DNA, 26 bp, Homo sapiens
ggagatattatatacatcttcaatca

SEQ ID NO: 5284 - DNA, 26 bp, Homo sapiens
gagatattatatacatcttcaatcaa

SEQ ID NO: 5285 - DNA, 26 bp, Homo sapiens
agatattatatacatcttcaatcaac

SEQ ID NO: 5286 - DNA, 26 bp, Homo sapiens
gatattatatacatcttcaatcaaca

SEQ ID NO: 5287 - DNA, 26 bp, Homo sapiens
atattatatacatcttcaatcaacag

SEQ ID NO: 5288 - DNA, 26 bp, Homo sapiens
tattatatacatcttcaatcaacagc

SEQ ID NO: 5289 - DNA, 26 bp, Homo sapiens
attatatacatcttcaatcaacagca

SEQ ID NO: 5290 - DNA, 26 bp, Homo sapiens
ttatatacatcttcaatcaacagcaa

SEQ ID NO: 5291 - DNA, 26 bp, Homo sapiens
tatatacatcttcaatcaacagcaac

SEQ ID NO: 5292 - DNA, 26 bp, Homo sapiens
atatacatcttcaatcaacagcaacc

SEQ ID NO: 5293 - DNA, 26 bp, Homo sapiens
tatacatcttcaatcaacagcaaccc

SEQ ID NO: 5294 - DNA, 26 bp, Homo sapiens
atacatcttcaatcaacagcaacccc

SEQ ID NO: 5295 - DNA, 26 bp, Homo sapiens
tacatcttcaatcaacagcaaccccc

SEQ ID NO: 5296 - DNA, 26 bp, Homo sapiens
acatcttcaatcaacagcaaccccca

SEQ ID NO: 5297 - DNA, 26 bp, Homo sapiens
catcttcaatcaacagcaacccccac

SEQ ID NO: 5298 - DNA, 26 bp, Homo sapiens
atcttcaatcaacagcaacccccacc

SEQ ID NO: 5299 - DNA, 26 bp, Homo sapiens
tcttcaatcaacagcaacccccacct

SEQ ID NO: 5300 - DNA, 26 bp, Homo sapiens
cttcaatcaacagcaacccccacctc

SEQ ID NO: 5301 - DNA, 26 bp, Homo sapiens
ttcaatcaacagcaacccccacctcc

SEQ ID NO: 5302 - DNA, 26 bp, Homo sapiens
tcaatcaacagcaacccccacctcca

SEQ ID NO: 5303 - DNA, 26 bp, Homo sapiens
caatcaacagcaacccccacctccac

SEQ ID NO: 5304 - DNA, 26 bp, Homo sapiens
aatcaacagcaacccccacctccact

SEQ ID NO: 5305 - DNA, 26 bp, Homo sapiens
atcaacagcaacccccacctccactg

SEQ ID NO: 5306 - DNA, 26 bp, Homo sapiens
tcaacagcaacccccacctccactgc

SEQ ID NO: 5307 - DNA, 26 bp, Homo sapiens
caacagcaacccccacctccactgct

SEQ ID NO: 5308 - DNA, 26 bp, Homo sapiens
aacagcaacccccacctccactgctt

SEQ ID NO: 5309 - DNA, 26 bp, Homo sapiens
acagcaacccccacctccactgcttt

SEQ ID NO: 5310 - DNA, 26 bp, Homo sapiens
cagcaacccccacctccactgctttc

SEQ ID NO: 5311 - DNA, 26 bp, Homo sapiens
agcaacccccacctccactgctttct

SEQ ID NO: 5312 - DNA, 26 bp, Homo sapiens
gcaacccccacctccactgctttctg

SEQ ID NO: 5313 - DNA, 26 bp, Homo sapiens
caacccccacctccactgctttctgt

SEQ ID NO: 5314 - DNA, 26 bp, Homo sapiens
aacccccacctccactgctttctgtt

SEQ ID NO: 5315 - DNA, 26 bp, Homo sapiens
acccccacctccactgctttctgttt

SEQ ID NO: 5316 - DNA, 26 bp, Homo sapiens
cccccacctccactgctttctgtttg

SEQ ID NO: 5317 - DNA, 26 bp, Homo sapiens
ccccacctccactgctttctgtttgg

SEQ ID NO: 5318 - DNA, 26 bp, Homo sapiens
cccacctccactgctttctgtttggt

SEQ ID NO: 5319 - DNA, 26 bp, Homo sapiens
ccacctccactgctttctgtttggtt

SEQ ID NO: 5320 - DNA, 26 bp, Homo sapiens
cacctccactgctttctgtttggttt

SEQ ID NO: 5321 - DNA, 26 bp, Homo sapiens
acctccactgctttctgtttggtttg

SEQ ID NO: 5322 - DNA, 26 bp, Homo sapiens
cctccactgctttctgtttggtttgg

SEQ ID NO: 5323 - DNA, 26 bp, Homo sapiens
ctccactgctttctgtttggtttggt

SEQ ID NO: 5324 - DNA, 26 bp, Homo sapiens
tccactgctttctgtttggtttggtt

SEQ ID NO: 5325 - DNA, 26 bp, Homo sapiens
ccactgctttctgtttggtttggttt

SEQ ID NO: 5326 - DNA, 26 bp, Homo sapiens
cactgctttctgtttggtttggtttg

SEQ ID NO: 5327 - DNA, 26 bp, Homo sapiens
actgctttctgtttggtttggtttga

SEQ ID NO: 5328 - DNA, 26 bp, Homo sapiens
ctgctttctgtttggtttggtttgag

SEQ ID NO: 5329 - DNA, 26 bp, Homo sapiens
tgctttctgtttggtttggtttgagt

SEQ ID NO: 5330 - DNA, 26 bp, Homo sapiens
gctttctgtttggtttggtttgagtt

SEQ ID NO: 5331 - DNA, 26 bp, Homo sapiens
ctttctgtttggtttggtttgagttt

SEQ ID NO: 5332 - DNA, 26 bp, Homo sapiens
tttctgtttggtttggtttgagtttg

SEQ ID NO: 5333 - DNA, 26 bp, Homo sapiens
ttctgtttggtttggtttgagtttgg

SEQ ID NO: 5334 - DNA, 26 bp, Homo sapiens
tctgtttggtttggtttgagtttggg

SEQ ID NO: 5335 - DNA, 26 bp, Homo sapiens
ctgtttggtttggtttgagtttggga

SEQ ID NO: 5336 - DNA, 26 bp, Homo sapiens
tgtttggtttggtttgagtttgggat

SEQ ID NO: 5337 - DNA, 26 bp, Homo sapiens
gtttggtttggtttgagtttgggatt

SEQ ID NO: 5338 - DNA, 26 bp, Homo sapiens
tttggtttggtttgagtttgggattt

SEQ ID NO: 5339 - DNA, 26 bp, Homo sapiens
ttggtttggtttgagtttgggatttt

SEQ ID NO: 5340 - DNA, 26 bp, Homo sapiens
tggtttggtttgagtttgggattttg

SEQ ID NO: 5341 - DNA, 26 bp, Homo sapiens
ggtttggtttgagtttgggattttgg

SEQ ID NO: 5342 - DNA, 26 bp, Homo sapiens
gtttggtttgagtttgggattttggg

SEQ ID NO: 5343 - DNA, 26 bp, Homo sapiens
tttggtttgagtttgggattttgggc

SEQ ID NO: 5344 - DNA, 26 bp, Homo sapiens
ttggtttgagtttgggattttgggct

SEQ ID NO: 5345 - DNA, 26 bp, Homo sapiens
tggtttgagtttgggattttgggcta

SEQ ID NO: 5346 - DNA, 26 bp, Homo sapiens
ggtttgagtttgggattttgggctag

SEQ ID NO: 5347 - DNA, 26 bp, Homo sapiens
gtttgagtttgggattttgggctagc

SEQ ID NO: 5348 - DNA, 26 bp, Homo sapiens
tttgagtttgggattttgggctagct

SEQ ID NO: 5349 - DNA, 26 bp, Homo sapiens
ttgagtttgggattttgggctagctc

SEQ ID NO: 5350 - DNA, 26 bp, Homo sapiens
tgagtttgggattttgggctagctct

SEQ ID NO: 5351 - DNA, 26 bp, Homo sapiens
gagtttgggattttgggctagctctt

SEQ ID NO: 5352 - DNA, 26 bp, Homo sapiens
agtttgggattttgggctagctcttt

SEQ ID NO: 5353 - DNA, 26 bp, Homo sapiens
gtttgggattttgggctagctctttt

SEQ ID NO: 5354 - DNA, 26 bp, Homo sapiens
tttgggattttgggctagctcttttt

SEQ ID NO: 5355 - DNA, 26 bp, Homo sapiens
ttgggattttgggctagctctttttt

SEQ ID NO: 5356 - DNA, 26 bp, Homo sapiens
tgggattttgggctagctcttttttc

SEQ ID NO: 5357 - DNA, 26 bp, Homo sapiens
gggattttgggctagctcttttttct

SEQ ID NO: 5358 - DNA, 26 bp, Homo sapiens
ggattttgggctagctcttttttctt

SEQ ID NO: 5359 - DNA, 26 bp, Homo sapiens
gattttgggctagctcttttttcttt

SEQ ID NO: 5360 - DNA, 26 bp, Homo sapiens
attttgggctagctcttttttctttg

SEQ ID NO: 5361 - DNA, 26 bp, Homo sapiens
ttttgggctagctcttttttctttgt

SEQ ID NO: 5362 - DNA, 26 bp, Homo sapiens
tttgggctagctcttttttctttgtc

SEQ ID NO: 5363 - DNA, 26 bp, Homo sapiens
ttgggctagctcttttttctttgtct

SEQ ID NO: 5364 - DNA, 26 bp, Homo sapiens
tgggctagctcttttttctttgtctg

SEQ ID NO: 5365 - DNA, 26 bp, Homo sapiens
gggctagctcttttttctttgtctgc

SEQ ID NO: 5366 - DNA, 26 bp, Homo sapiens
ggctagctcttttttctttgtctgct

SEQ ID NO: 5367 - DNA, 26 bp, Homo sapiens
gctagctcttttttctttgtctgctt

SEQ ID NO: 5368 - DNA, 26 bp, Homo sapiens
ctagctcttttttctttgtctgcttt

SEQ ID NO: 5369 - DNA, 26 bp, Homo sapiens
tagctcttttttctttgtctgctttc

SEQ ID NO: 5370 - DNA, 26 bp, Homo sapiens
agctcttttttctttgtctgctttct

SEQ ID NO: 5371 - DNA, 26 bp, Homo sapiens
gctcttttttctttgtctgctttctg

SEQ ID NO: 5372 - DNA, 26 bp, Homo sapiens
ctcttttttctttgtctgctttctgt

SEQ ID NO: 5373 - DNA, 26 bp, Homo sapiens
tcttttttctttgtctgctttctgtt

SEQ ID NO: 5374 - DNA, 26 bp, Homo sapiens
cttttttctttgtctgctttctgttt

SEQ ID NO: 5375 - DNA, 26 bp, Homo sapiens
ttttttctttgtctgctttctgtttt

SEQ ID NO: 5376 - DNA, 26 bp, Homo sapiens
tttttctttgtctgctttctgttttc

SEQ ID NO: 5377 - DNA, 26 bp, Homo sapiens
ttttctttgtctgctttctgttttcc

SEQ ID NO: 5378 - DNA, 26 bp, Homo sapiens
tttctttgtctgctttctgttttccc

SEQ ID NO: 5379 - DNA, 26 bp, Homo sapiens
ttctttgtctgctttctgttttccct

SEQ ID NO: 5380 - DNA, 26 bp, Homo sapiens
tctttgtctgctttctgttttccctt

SEQ ID NO: 5381 - DNA, 26 bp, Homo sapiens
ctttgtctgctttctgttttcccttc

SEQ ID NO: 5382 - DNA, 26 bp, Homo sapiens
tttgtctgctttctgttttcccttcc

SEQ ID NO: 5383 - DNA, 26 bp, Homo sapiens
ttgtctgctttctgttttcccttcct

SEQ ID NO: 5384 - DNA, 26 bp, Homo sapiens
tgtctgctttctgttttcccttcctc

SEQ ID NO: 5385 - DNA, 26 bp, Homo sapiens
gtctgctttctgttttcccttcctcc

SEQ ID NO: 5386 - DNA, 26 bp, Homo sapiens
tctgctttctgttttcccttcctccc

SEQ ID NO: 5387 - DNA, 26 bp, Homo sapiens
ctgctttctgttttcccttcctccct

SEQ ID NO: 5388 - DNA, 26 bp, Homo sapiens
tgctttctgttttcccttcctccctt

SEQ ID NO: 5389 - DNA, 26 bp, Homo sapiens
gctttctgttttcccttcctcccttc

SEQ ID NO: 5390 - DNA, 26 bp, Homo sapiens
ctttctgttttcccttcctcccttcc

SEQ ID NO: 5391 - DNA, 26 bp, Homo sapiens
tttctgttttcccttcctcccttccc

SEQ ID NO: 5392 - DNA, 26 bp, Homo sapiens
ttctgttttcccttcctcccttccct

SEQ ID NO: 5393 - DNA, 26 bp, Homo sapiens
tctgttttcccttcctcccttcccta

SEQ ID NO: 5394 - DNA, 26 bp, Homo sapiens
ctgttttcccttcctcccttccctat

SEQ ID NO: 5395 - DNA, 26 bp, Homo sapiens
tgttttcccttcctcccttccctatg

SEQ ID NO: 5396 - DNA, 26 bp, Homo sapiens
gttttcccttcctcccttccctatgt

SEQ ID NO: 5397 - DNA, 26 bp, Homo sapiens
ttttcccttcctcccttccctatgta

SEQ ID NO: 5398 - DNA, 26 bp, Homo sapiens
tttcccttcctcccttccctatgtac

SEQ ID NO: 5399 - DNA, 26 bp, Homo sapiens
ttcccttcctcccttccctatgtacg

SEQ ID NO: 5400 - DNA, 26 bp, Homo sapiens
tcccttcctcccttccctatgtacgc

SEQ ID NO: 5401 - DNA, 26 bp, Homo sapiens
cccttcctcccttccctatgtacgct

SEQ ID NO: 5402 - DNA, 26 bp, Homo sapiens
ccttcctcccttccctatgtacgctc

SEQ ID NO: 5403 - DNA, 26 bp, Homo sapiens
cttcctcccttccctatgtacgctca

SEQ ID NO: 5404 - DNA, 26 bp, Homo sapiens
ttcctcccttccctatgtacgctcag

SEQ ID NO: 5405 - DNA, 26 bp, Homo sapiens
tcctcccttccctatgtacgctcaga

SEQ ID NO: 5406 - DNA, 26 bp, Homo sapiens
cctcccttccctatgtacgctcagag

SEQ ID NO: 5407 - DNA, 26 bp, Homo sapiens
ctcccttccctatgtacgctcagagc

SEQ ID NO: 5408 - DNA, 26 bp, Homo sapiens
tcccttccctatgtacgctcagagcc

SEQ ID NO: 5409 - DNA, 26 bp, Homo sapiens
cccttccctatgtacgctcagagcct

SEQ ID NO: 5410 - DNA, 26 bp, Homo sapiens
ccttccctatgtacgctcagagcctc

SEQ ID NO: 5411 - DNA, 26 bp, Homo sapiens
cttccctatgtacgctcagagcctca

SEQ ID NO: 5412 - DNA, 26 bp, Homo sapiens
ttccctatgtacgctcagagcctcag

SEQ ID NO: 5413 - DNA, 26 bp, Homo sapiens
tccctatgtacgctcagagcctcaga

SEQ ID NO: 5414 - DNA, 26 bp, Homo sapiens
ccctatgtacgctcagagcctcagac

SEQ ID NO: 5415 - DNA, 26 bp, Homo sapiens
cctatgtacgctcagagcctcagaca

SEQ ID NO: 5416 - DNA, 26 bp, Homo sapiens
ctatgtacgctcagagcctcagacag

SEQ ID NO: 5417 - DNA, 26 bp, Homo sapiens
tatgtacgctcagagcctcagacaga

SEQ ID NO: 5418 - DNA, 26 bp, Homo sapiens
atgtacgctcagagcctcagacagac

SEQ ID NO: 5419 - DNA, 26 bp, Homo sapiens
tgtacgctcagagcctcagacagacc

SEQ ID NO: 5420 - DNA, 26 bp, Homo sapiens
gtacgctcagagcctcagacagaccg

SEQ ID NO: 5421 - DNA, 26 bp, Homo sapiens
tacgctcagagcctcagacagaccgt

SEQ ID NO: 5422 - DNA, 26 bp, Homo sapiens
acgctcagagcctcagacagaccgtc

SEQ ID NO: 5423 - DNA, 26 bp, Homo sapiens
cgctcagagcctcagacagaccgtct

SEQ ID NO: 5424 - DNA, 26 bp, Homo sapiens
gctcagagcctcagacagaccgtctg

SEQ ID NO: 5425 - DNA, 26 bp, Homo sapiens
ctcagagcctcagacagaccgtctgg

SEQ ID NO: 5426 - DNA, 26 bp, Homo sapiens
tcagagcctcagacagaccgtctggg

SEQ ID NO: 5427 - DNA, 26 bp, Homo sapiens
cagagcctcagacagaccgtctgggc

SEQ ID NO: 5428 - DNA, 26 bp, Homo sapiens
agagcctcagacagaccgtctgggcg

SEQ ID NO: 5429 - DNA, 26 bp, Homo sapiens
gagcctcagacagaccgtctgggcgc

SEQ ID NO: 5430 - DNA, 26 bp, Homo sapiens
agcctcagacagaccgtctgggcgcc

SEQ ID NO: 5431 - DNA, 26 bp, Homo sapiens
gcctcagacagaccgtctgggcgcct

SEQ ID NO: 5432 - DNA, 26 bp, Homo sapiens
cctcagacagaccgtctgggcgcctc

SEQ ID NO: 5433 - DNA, 26 bp, Homo sapiens
ctcagacagaccgtctgggcgcctca

SEQ ID NO: 5434 - DNA, 26 bp, Homo sapiens
tcagacagaccgtctgggcgcctcat

SEQ ID NO: 5435 - DNA, 26 bp, Homo sapiens
cagacagaccgtctgggcgcctcatt

SEQ ID NO: 5436 - DNA, 26 bp, Homo sapiens
agacagaccgtctgggcgcctcattc

SEQ ID NO: 5437 - DNA, 26 bp, Homo sapiens
gacagaccgtctgggcgcctcattcg

SEQ ID NO: 5438 - DNA, 26 bp, Homo sapiens
acagaccgtctgggcgcctcattcgc

SEQ ID NO: 5439 - DNA, 26 bp, Homo sapiens
cagaccgtctgggcgcctcattcgcg

SEQ ID NO: 5440 - DNA, 26 bp, Homo sapiens
agaccgtctgggcgcctcattcgcgt

SEQ ID NO: 5441 - DNA, 26 bp, Homo sapiens
gaccgtctgggcgcctcattcgcgtt

SEQ ID NO: 5442 - DNA, 26 bp, Homo sapiens
accgtctgggcgcctcattcgcgttt

SEQ ID NO: 5443 - DNA, 26 bp, Homo sapiens
ccgtctgggcgcctcattcgcgtttc

SEQ ID NO: 5444 - DNA, 26 bp, Homo sapiens
cgtctgggcgcctcattcgcgtttcc

SEQ ID NO: 5445 - DNA, 26 bp, Homo sapiens
gtctgggcgcctcattcgcgtttccg

SEQ ID NO: 5446 - DNA, 26 bp, Homo sapiens
tctgggcgcctcattcgcgtttccgc

SEQ ID NO: 5447 - DNA, 26 bp, Homo sapiens
ctgggcgcctcattcgcgtttccgca

SEQ ID NO: 5448 - DNA, 26 bp, Homo sapiens
tgggcgcctcattcgcgtttccgcaa

SEQ ID NO: 5449 - DNA, 26 bp, Homo sapiens
gggcgcctcattcgcgtttccgcaag

SEQ ID NO: 5450 - DNA, 26 bp, Homo sapiens
ggcgcctcattcgcgtttccgcaaga

SEQ ID NO: 5451 - DNA, 26 bp, Homo sapiens
gcgcctcattcgcgtttccgcaagat

SEQ ID NO: 5452 - DNA, 26 bp, Homo sapiens
cgcctcattcgcgtttccgcaagatc

SEQ ID NO: 5453 - DNA, 26 bp, Homo sapiens
gcctcattcgcgtttccgcaagatca

SEQ ID NO: 5454 - DNA, 26 bp, Homo sapiens
cctcattcgcgtttccgcaagatcac

SEQ ID NO: 5455 - DNA, 26 bp, Homo sapiens
ctcattcgcgtttccgcaagatcaca

SEQ ID NO: 5456 - DNA, 26 bp, Homo sapiens
tcattcgcgtttccgcaagatcacat

SEQ ID NO: 5457 - DNA, 26 bp, Homo sapiens
cattcgcgtttccgcaagatcacata

SEQ ID NO: 5458 - DNA, 26 bp, Homo sapiens
attcgcgtttccgcaagatcacatag

SEQ ID NO: 5459 - DNA, 26 bp, Homo sapiens
ttcgcgtttccgcaagatcacataga

SEQ ID NO: 5460 - DNA, 26 bp, Homo sapiens
tcgcgtttccgcaagatcacatagat

SEQ ID NO: 5461 - DNA, 26 bp, Homo sapiens
cgcgtttccgcaagatcacatagatg

SEQ ID NO: 5462 - DNA, 26 bp, Homo sapiens
gcgtttccgcaagatcacatagatga

SEQ ID NO: 5463 - DNA, 26 bp, Homo sapiens
cgtttccgcaagatcacatagatgac

SEQ ID NO: 5464 - DNA, 26 bp, Homo sapiens
gtttccgcaagatcacatagatgaca

SEQ ID NO: 5465 - DNA, 26 bp, Homo sapiens
tttccgcaagatcacatagatgacac

SEQ ID NO: 5466 - DNA, 26 bp, Homo sapiens
ttccgcaagatcacatagatgacacc

SEQ ID NO: 5467 - DNA, 26 bp, Homo sapiens
tccgcaagatcacatagatgacaccg

SEQ ID NO: 5468 - DNA, 26 bp, Homo sapiens
ccgcaagatcacatagatgacaccgc

SEQ ID NO: 5469 - DNA, 26 bp, Homo sapiens
cgcaagatcacatagatgacaccgct

SEQ ID NO: 5470 - DNA, 26 bp, Homo sapiens
gcaagatcacatagatgacaccgctg

SEQ ID NO: 5471 - DNA, 26 bp, Homo sapiens
caagatcacatagatgacaccgctga

SEQ ID NO: 5472 - DNA, 26 bp, Homo sapiens
aagatcacatagatgacaccgctgag

SEQ ID NO: 5473 - DNA, 26 bp, Homo sapiens
agatcacatagatgacaccgctgaga

SEQ ID NO: 5474 - DNA, 26 bp, Homo sapiens
gatcacatagatgacaccgctgagaa

SEQ ID NO: 5475 - DNA, 26 bp, Homo sapiens
atcacatagatgacaccgctgagaag

SEQ ID NO: 5476 - DNA, 26 bp, Homo sapiens
tcacatagatgacaccgctgagaagg

SEQ ID NO: 5477 - DNA, 26 bp, Homo sapiens
cacatagatgacaccgctgagaaggg

SEQ ID NO: 5478 - DNA, 26 bp, Homo sapiens
acatagatgacaccgctgagaagggc

SEQ ID NO: 5479 - DNA, 26 bp, Homo sapiens
catagatgacaccgctgagaagggcc

SEQ ID NO: 5480 - DNA, 26 bp, Homo sapiens
atagatgacaccgctgagaagggcca

SEQ ID NO: 5481 - DNA, 26 bp, Homo sapiens
tagatgacaccgctgagaagggccag

SEQ ID NO: 5482 - DNA, 26 bp, Homo sapiens
agatgacaccgctgagaagggccagg

SEQ ID NO: 5483 - DNA, 26 bp, Homo sapiens
gatgacaccgctgagaagggccaggg

SEQ ID NO: 5484 - DNA, 26 bp, Homo sapiens
atgacaccgctgagaagggccagggg

SEQ ID NO: 5485 - DNA, 26 bp, Homo sapiens
tgacaccgctgagaagggccaggggg

SEQ ID NO: 5486 - DNA, 26 bp, Homo sapiens
gacaccgctgagaagggccaggggga

SEQ ID NO: 5487 - DNA, 26 bp, Homo sapiens
acaccgctgagaagggccagggggaa

SEQ ID NO: 5488 - DNA, 26 bp, Homo sapiens
caccgctgagaagggccagggggaag

SEQ ID NO: 5489 - DNA, 26 bp, Homo sapiens
accgctgagaagggccagggggaagg

SEQ ID NO: 5490 - DNA, 26 bp, Homo sapiens
ccgctgagaagggccagggggaaggc

SEQ ID NO: 5491 - DNA, 26 bp, Homo sapiens
cgctgagaagggccagggggaaggcc

SEQ ID NO: 5492 - DNA, 26 bp, Homo sapiens
gctgagaagggccagggggaaggcca

SEQ ID NO: 5493 - DNA, 26 bp, Homo sapiens
ctgagaagggccagggggaaggccac

SEQ ID NO: 5494 - DNA, 26 bp, Homo sapiens
tgagaagggccagggggaaggccacc

SEQ ID NO: 5495 - DNA, 26 bp, Homo sapiens
gagaagggccagggggaaggccaccc

SEQ ID NO: 5496 - DNA, 26 bp, Homo sapiens
agaagggccagggggaaggccaccca

SEQ ID NO: 5497 - DNA, 26 bp, Homo sapiens
gaagggccagggggaaggccacccag

SEQ ID NO: 5498 - DNA, 26 bp, Homo sapiens
aagggccagggggaaggccacccagg

SEQ ID NO: 5499 - DNA, 26 bp, Homo sapiens
agggccagggggaaggccacccaggc

SEQ ID NO: 5500 - DNA, 26 bp, Homo sapiens
gggccagggggaaggccacccaggcc

SEQ ID NO: 5501 - DNA, 26 bp, Homo sapiens
ggccagggggaaggccacccaggcca

SEQ ID NO: 5502 - DNA, 26 bp, Homo sapiens
gccagggggaaggccacccaggccag

SEQ ID NO: 5503 - DNA, 26 bp, Homo sapiens
ccagggggaaggccacccaggccagg

SEQ ID NO: 5504 - DNA, 26 bp, Homo sapiens
cagggggaaggccacccaggccagga

SEQ ID NO: 5505 - DNA, 26 bp, Homo sapiens
agggggaaggccacccaggccaggat

SEQ ID NO: 5506 - DNA, 26 bp, Homo sapiens
gggggaaggccacccaggccaggatg

SEQ ID NO: 5507 - DNA, 26 bp, Homo sapiens
ggggaaggccacccaggccaggatgt

SEQ ID NO: 5508 - DNA, 26 bp, Homo sapiens
gggaaggccacccaggccaggatgta

SEQ ID NO: 5509 - DNA, 26 bp, Homo sapiens
ggaaggccacccaggccaggatgtag

SEQ ID NO: 5510 - DNA, 26 bp, Homo sapiens
gaaggccacccaggccaggatgtagg

SEQ ID NO: 5511 - DNA, 26 bp, Homo sapiens
aaggccacccaggccaggatgtaggc

SEQ ID NO: 5512 - DNA, 26 bp, Homo sapiens
aggccacccaggccaggatgtaggcg

SEQ ID NO: 5513 - DNA, 26 bp, Homo sapiens
ggccacccaggccaggatgtaggcga

SEQ ID NO: 5514 - DNA, 26 bp, Homo sapiens
gccacccaggccaggatgtaggcgaa

SEQ ID NO: 5515 - DNA, 26 bp, Homo sapiens
ccacccaggccaggatgtaggcgaaa

SEQ ID NO: 5516 - DNA, 26 bp, Homo sapiens
cacccaggccaggatgtaggcgaaac

SEQ ID NO: 5517 - DNA, 26 bp, Homo sapiens
acccaggccaggatgtaggcgaaacc

SEQ ID NO: 5518 - DNA, 26 bp, Homo sapiens
cccaggccaggatgtaggcgaaaccg

SEQ ID NO: 5519 - DNA, 26 bp, Homo sapiens
ccaggccaggatgtaggcgaaaccgt

SEQ ID NO: 5520 - DNA, 26 bp, Homo sapiens
caggccaggatgtaggcgaaaccgta

SEQ ID NO: 5521 - DNA, 26 bp, Homo sapiens
aggccaggatgtaggcgaaaccgtag

SEQ ID NO: 5522 - DNA, 26 bp, Homo sapiens
ggccaggatgtaggcgaaaccgtagg

SEQ ID NO: 5523 - DNA, 26 bp, Homo sapiens
gccaggatgtaggcgaaaccgtagga

SEQ ID NO: 5524 - DNA, 26 bp, Homo sapiens
ccaggatgtaggcgaaaccgtaggag

SEQ ID NO: 5525 - DNA, 26 bp, Homo sapiens
caggatgtaggcgaaaccgtaggagt

SEQ ID NO: 5526 - DNA, 26 bp, Homo sapiens
aggatgtaggcgaaaccgtaggagta

SEQ ID NO: 5527 - DNA, 26 bp, Homo sapiens
ggatgtaggcgaaaccgtaggagtaa

SEQ ID NO: 5528 - DNA, 26 bp, Homo sapiens
gatgtaggcgaaaccgtaggagtaat

SEQ ID NO: 5529 - DNA, 26 bp, Homo sapiens
atgtaggcgaaaccgtaggagtaatc

SEQ ID NO: 5530 - DNA, 26 bp, Homo sapiens
tgtaggcgaaaccgtaggagtaatcc

SEQ ID NO: 5531 - DNA, 26 bp, Homo sapiens
gtaggcgaaaccgtaggagtaatccg

SEQ ID NO: 5532 - DNA, 26 bp, Homo sapiens
taggcgaaaccgtaggagtaatccga

SEQ ID NO: 5533 - DNA, 26 bp, Homo sapiens
aggcgaaaccgtaggagtaatccgag

SEQ ID NO: 5534 - DNA, 26 bp, Homo sapiens
ggcgaaaccgtaggagtaatccgagt

SEQ ID NO: 5535 - DNA, 26 bp, Homo sapiens
gcgaaaccgtaggagtaatccgagtt

SEQ ID NO: 5536 - DNA, 26 bp, Homo sapiens
cgaaaccgtaggagtaatccgagttg

SEQ ID NO: 5537 - DNA, 26 bp, Homo sapiens
gaaaccgtaggagtaatccgagttga

SEQ ID NO: 5538 - DNA, 26 bp, Homo sapiens
aaaccgtaggagtaatccgagttgag

SEQ ID NO: 5539 - DNA, 26 bp, Homo sapiens
aaccgtaggagtaatccgagttgaga

SEQ ID NO: 5540 - DNA, 26 bp, Homo sapiens
accgtaggagtaatccgagttgagat

SEQ ID NO: 5541 - DNA, 26 bp, Homo sapiens
ccgtaggagtaatccgagttgagatg

SEQ ID NO: 5542 - DNA, 26 bp, Homo sapiens
cgtaggagtaatccgagttgagatgc

SEQ ID NO: 5543 - DNA, 26 bp, Homo sapiens
gtaggagtaatccgagttgagatgcc

SEQ ID NO: 5544 - DNA, 26 bp, Homo sapiens
taggagtaatccgagttgagatgcca

SEQ ID NO: 5545 - DNA, 26 bp, Homo sapiens
aggagtaatccgagttgagatgccac

SEQ ID NO: 5546 - DNA, 26 bp, Homo sapiens
ggagtaatccgagttgagatgccact

SEQ ID NO: 5547 - DNA, 26 bp, Homo sapiens
gagtaatccgagttgagatgccactc

SEQ ID NO: 5548 - DNA, 26 bp, Homo sapiens
agtaatccgagttgagatgccactcc

SEQ ID NO: 5549 - DNA, 26 bp, Homo sapiens
gtaatccgagttgagatgccactccg

SEQ ID NO: 5550 - DNA, 26 bp, Homo sapiens
taatccgagttgagatgccactccgg

SEQ ID NO: 5551 - DNA, 26 bp, Homo sapiens
aatccgagttgagatgccactccggg

SEQ ID NO: 5552 - DNA, 26 bp, Homo sapiens
atccgagttgagatgccactccgggt

SEQ ID NO: 5553 - DNA, 26 bp, Homo sapiens
tccgagttgagatgccactccgggtg

SEQ ID NO: 5554 - DNA, 26 bp, Homo sapiens
ccgagttgagatgccactccgggtgc

SEQ ID NO: 5555 - DNA, 26 bp, Homo sapiens
cgagttgagatgccactccgggtgcc

SEQ ID NO: 5556 - DNA, 26 bp, Homo sapiens
gagttgagatgccactccgggtgcct

SEQ ID NO: 5557 - DNA, 26 bp, Homo sapiens
agttgagatgccactccgggtgcctc

SEQ ID NO: 5558 - DNA, 26 bp, Homo sapiens
gttgagatgccactccgggtgcctca

SEQ ID NO: 5559 - DNA, 26 bp, Homo sapiens
ttgagatgccactccgggtgcctcac

SEQ ID NO: 5560 - DNA, 26 bp, Homo sapiens
tgagatgccactccgggtgcctcacc

SEQ ID NO: 5561 - DNA, 26 bp, Homo sapiens
gagatgccactccgggtgcctcaccg

SEQ ID NO: 5562 - DNA, 26 bp, Homo sapiens
agatgccactccgggtgcctcaccgt

SEQ ID NO: 5563 - DNA, 26 bp, Homo sapiens
gatgccactccgggtgcctcaccgtg

SEQ ID NO: 5564 - DNA, 26 bp, Homo sapiens
atgccactccgggtgcctcaccgtgt

SEQ ID NO: 5565 - DNA, 26 bp, Homo sapiens
tgccactccgggtgcctcaccgtgta

SEQ ID NO: 5566 - DNA, 26 bp, Homo sapiens
gccactccgggtgcctcaccgtgtag

SEQ ID NO: 5567 - DNA, 26 bp, Homo sapiens
ccactccgggtgcctcaccgtgtaga

SEQ ID NO: 5568 - DNA, 26 bp, Homo sapiens
cactccgggtgcctcaccgtgtagat

SEQ ID NO: 5569 - DNA, 26 bp, Homo sapiens
actccgggtgcctcaccgtgtagatg

SEQ ID NO: 5570 - DNA, 26 bp, Homo sapiens
ctccgggtgcctcaccgtgtagatgg

SEQ ID NO: 5571 - DNA, 26 bp, Homo sapiens
tccgggtgcctcaccgtgtagatggc

SEQ ID NO: 5572 - DNA, 26 bp, Homo sapiens
ccgggtgcctcaccgtgtagatggcc

SEQ ID NO: 5573 - DNA, 26 bp, Homo sapiens
cgggtgcctcaccgtgtagatggccg

SEQ ID NO: 5574 - DNA, 26 bp, Homo sapiens
gggtgcctcaccgtgtagatggccgc

SEQ ID NO: 5575 - DNA, 26 bp, Homo sapiens
ggtgcctcaccgtgtagatggccgca

SEQ ID NO: 5576 - DNA, 26 bp, Homo sapiens
gtgcctcaccgtgtagatggccgcag

SEQ ID NO: 5577 - DNA, 26 bp, Homo sapiens
tgcctcaccgtgtagatggccgcagc

SEQ ID NO: 5578 - DNA, 26 bp, Homo sapiens
gcctcaccgtgtagatggccgcagca

SEQ ID NO: 5579 - DNA, 26 bp, Homo sapiens
cctcaccgtgtagatggccgcagcac

SEQ ID NO: 5580 - DNA, 26 bp, Homo sapiens
ctcaccgtgtagatggccgcagcact

SEQ ID NO: 5581 - DNA, 26 bp, Homo sapiens
tcaccgtgtagatggccgcagcactc

SEQ ID NO: 5582 - DNA, 26 bp, Homo sapiens
caccgtgtagatggccgcagcactca

SEQ ID NO: 5583 - DNA, 26 bp, Homo sapiens
accgtgtagatggccgcagcactcat

SEQ ID NO: 5584 - DNA, 26 bp, Homo sapiens
ccgtgtagatggccgcagcactcatc

SEQ ID NO: 5585 - DNA, 26 bp, Homo sapiens
cgtgtagatggccgcagcactcatca

SEQ ID NO: 5586 - DNA, 26 bp, Homo sapiens
gtgtagatggccgcagcactcatcac

SEQ ID NO: 5587 - DNA, 26 bp, Homo sapiens
tgtagatggccgcagcactcatcacg

SEQ ID NO: 5588 - DNA, 26 bp, Homo sapiens
gtagatggccgcagcactcatcacgc

SEQ ID NO: 5589 - DNA, 26 bp, Homo sapiens
tagatggccgcagcactcatcacgca

SEQ ID NO: 5590 - DNA, 26 bp, Homo sapiens
agatggccgcagcactcatcacgcac

SEQ ID NO: 5591 - DNA, 26 bp, Homo sapiens
gatggccgcagcactcatcacgcaca

SEQ ID NO: 5592 - DNA, 26 bp, Homo sapiens
atggccgcagcactcatcacgcacag

SEQ ID NO: 5593 - DNA, 26 bp, Homo sapiens
tggccgcagcactcatcacgcacaga

SEQ ID NO: 5594 - DNA, 26 bp, Homo sapiens
ggccgcagcactcatcacgcacagac

SEQ ID NO: 5595 - DNA, 26 bp, Homo sapiens
gccgcagcactcatcacgcacagacc

SEQ ID NO: 5596 - DNA, 26 bp, Homo sapiens
ccgcagcactcatcacgcacagacca

SEQ ID NO: 5597 - DNA, 26 bp, Homo sapiens
cgcagcactcatcacgcacagaccag

SEQ ID NO: 5598 - DNA, 26 bp, Homo sapiens
gcagcactcatcacgcacagaccagc

SEQ ID NO: 5599 - DNA, 26 bp, Homo sapiens
cagcactcatcacgcacagaccagca

SEQ ID NO: 5600 - DNA, 26 bp, Homo sapiens
agcactcatcacgcacagaccagcaa

SEQ ID NO: 5601 - DNA, 26 bp, Homo sapiens
gcactcatcacgcacagaccagcaag

SEQ ID NO: 5602 - DNA, 26 bp, Homo sapiens
cactcatcacgcacagaccagcaaga

SEQ ID NO: 5603 - DNA, 26 bp, Homo sapiens
actcatcacgcacagaccagcaagaa

SEQ ID NO: 5604 - DNA, 26 bp, Homo sapiens
ctcatcacgcacagaccagcaagaat

SEQ ID NO: 5605 - DNA, 26 bp, Homo sapiens
tcatcacgcacagaccagcaagaatt

SEQ ID NO: 5606 - DNA, 26 bp, Homo sapiens
catcacgcacagaccagcaagaattt

SEQ ID NO: 5607 - DNA, 26 bp, Homo sapiens
atcacgcacagaccagcaagaatttg

SEQ ID NO: 5608 - DNA, 26 bp, Homo sapiens
tcacgcacagaccagcaagaatttgg

SEQ ID NO: 5609 - DNA, 26 bp, Homo sapiens
cacgcacagaccagcaagaatttgga

SEQ ID NO: 5610 - DNA, 26 bp, Homo sapiens
acgcacagaccagcaagaatttggaa

SEQ ID NO: 5611 - DNA, 26 bp, Homo sapiens
cgcacagaccagcaagaatttggaag

SEQ ID NO: 5612 - DNA, 26 bp, Homo sapiens
gcacagaccagcaagaatttggaaga

SEQ ID NO: 5613 - DNA, 26 bp, Homo sapiens
cacagaccagcaagaatttggaagat

SEQ ID NO: 5614 - DNA, 26 bp, Homo sapiens
acagaccagcaagaatttggaagatt

SEQ ID NO: 5615 - DNA, 26 bp, Homo sapiens
cagaccagcaagaatttggaagattc

SEQ ID NO: 5616 - DNA, 26 bp, Homo sapiens
agaccagcaagaatttggaagattcc

SEQ ID NO: 5617 - DNA, 26 bp, Homo sapiens
gaccagcaagaatttggaagattcca

SEQ ID NO: 5618 - DNA, 26 bp, Homo sapiens
accagcaagaatttggaagattccag

SEQ ID NO: 5619 - DNA, 26 bp, Homo sapiens
ccagcaagaatttggaagattccagt

SEQ ID NO: 5620 - DNA, 26 bp, Homo sapiens
cagcaagaatttggaagattccagtg

SEQ ID NO: 5621 - DNA, 26 bp, Homo sapiens
agcaagaatttggaagattccagtga

SEQ ID NO: 5622 - DNA, 26 bp, Homo sapiens
gcaagaatttggaagattccagtgat

SEQ ID NO: 5623 - DNA, 26 bp, Homo sapiens
caagaatttggaagattccagtgatg

SEQ ID NO: 5624 - DNA, 26 bp, Homo sapiens
aagaatttggaagattccagtgatgt

SEQ ID NO: 5625 - DNA, 26 bp, Homo sapiens
agaatttggaagattccagtgatgta

SEQ ID NO: 5626 - DNA, 26 bp, Homo sapiens
gaatttggaagattccagtgatgtaa

SEQ ID NO: 5627 - DNA, 26 bp, Homo sapiens
aatttggaagattccagtgatgtaaa

SEQ ID NO: 5628 - DNA, 26 bp, Homo sapiens
atttggaagattccagtgatgtaaaa

SEQ ID NO: 5629 - DNA, 26 bp, Homo sapiens
tttggaagattccagtgatgtaaaac

SEQ ID NO: 5630 - DNA, 26 bp, Homo sapiens
ttggaagattccagtgatgtaaaacc

SEQ ID NO: 5631 - DNA, 26 bp, Homo sapiens
tggaagattccagtgatgtaaaacct

SEQ ID NO: 5632 - DNA, 26 bp, Homo sapiens
ggaagattccagtgatgtaaaacctg

SEQ ID NO: 5633 - DNA, 26 bp, Homo sapiens
gaagattccagtgatgtaaaacctgc

SEQ ID NO: 5634 - DNA, 26 bp, Homo sapiens
aagattccagtgatgtaaaacctgcc

SEQ ID NO: 5635 - DNA, 26 bp, Homo sapiens
agattccagtgatgtaaaacctgccc

SEQ ID NO: 5636 - DNA, 26 bp, Homo sapiens
gattccagtgatgtaaaacctgcccc

SEQ ID NO: 5637 - DNA, 26 bp, Homo sapiens
attccagtgatgtaaaacctgccccc

SEQ ID NO: 5638 - DNA, 26 bp, Homo sapiens
ttccagtgatgtaaaacctgcccccc

SEQ ID NO: 5639 - DNA, 26 bp, Homo sapiens
tccagtgatgtaaaacctgcccccct

SEQ ID NO: 5640 - DNA, 26 bp, Homo sapiens
ccagtgatgtaaaacctgcccccctt

SEQ ID NO: 5641 - DNA, 26 bp, Homo sapiens
cagtgatgtaaaacctgccccccttg

SEQ ID NO: 5642 - DNA, 26 bp, Homo sapiens
agtgatgtaaaacctgccccccttgg

SEQ ID NO: 5643 - DNA, 26 bp, Homo sapiens
gtgatgtaaaacctgccccccttggt

SEQ ID NO: 5644 - DNA, 26 bp, Homo sapiens
tgatgtaaaacctgccccccttggtg

SEQ ID NO: 5645 - DNA, 26 bp, Homo sapiens
gatgtaaaacctgccccccttggtga

SEQ ID NO: 5646 - DNA, 26 bp, Homo sapiens
atgtaaaacctgccccccttggtgag

SEQ ID NO: 5647 - DNA, 26 bp, Homo sapiens
tgtaaaacctgccccccttggtgagg

SEQ ID NO: 5648 - DNA, 26 bp, Homo sapiens
gtaaaacctgccccccttggtgaggg

SEQ ID NO: 5649 - DNA, 26 bp, Homo sapiens
taaaacctgccccccttggtgagggt

SEQ ID NO: 5650 - DNA, 26 bp, Homo sapiens
aaaacctgccccccttggtgagggtg

SEQ ID NO: 5651 - DNA, 26 bp, Homo sapiens
aaacctgccccccttggtgagggtga

SEQ ID NO: 5652 - DNA, 26 bp, Homo sapiens
aacctgccccccttggtgagggtgaa

SEQ ID NO: 5653 - DNA, 26 bp, Homo sapiens
acctgccccccttggtgagggtgaag

SEQ ID NO: 5654 - DNA, 26 bp, Homo sapiens
cctgccccccttggtgagggtgaaga

SEQ ID NO: 5655 - DNA, 26 bp, Homo sapiens
ctgccccccttggtgagggtgaagag

SEQ ID NO: 5656 - DNA, 26 bp, Homo sapiens
tgccccccttggtgagggtgaagagt

SEQ ID NO: 5657 - DNA, 26 bp, Homo sapiens
gccccccttggtgagggtgaagagtt

SEQ ID NO: 5658 - DNA, 26 bp, Homo sapiens
ccccccttggtgagggtgaagagttg

SEQ ID NO: 5659 - DNA, 26 bp, Homo sapiens
cccccttggtgagggtgaagagttgg

SEQ ID NO: 5660 - DNA, 26 bp, Homo sapiens
ccccttggtgagggtgaagagttggc

SEQ ID NO: 5661 - DNA, 26 bp, Homo sapiens
cccttggtgagggtgaagagttggca

SEQ ID NO: 5662 - DNA, 26 bp, Homo sapiens
ccttggtgagggtgaagagttggcag

SEQ ID NO: 5663 - DNA, 26 bp, Homo sapiens
cttggtgagggtgaagagttggcaga

SEQ ID NO: 5664 - DNA, 26 bp, Homo sapiens
ttggtgagggtgaagagttggcagaa

SEQ ID NO: 5665 - DNA, 26 bp, Homo sapiens
tggtgagggtgaagagttggcagaag

SEQ ID NO: 5666 - DNA, 26 bp, Homo sapiens
ggtgagggtgaagagttggcagaaga

SEQ ID NO: 5667 - DNA, 26 bp, Homo sapiens
gtgagggtgaagagttggcagaagaa

SEQ ID NO: 5668 - DNA, 26 bp, Homo sapiens
tgagggtgaagagttggcagaagaac

SEQ ID NO: 5669 - DNA, 26 bp, Homo sapiens
gagggtgaagagttggcagaagaaca

SEQ ID NO: 5670 - DNA, 26 bp, Homo sapiens
agggtgaagagttggcagaagaacag

SEQ ID NO: 5671 - DNA, 26 bp, Homo sapiens
gggtgaagagttggcagaagaacagg

SEQ ID NO: 5672 - DNA, 26 bp, Homo sapiens
ggtgaagagttggcagaagaacagga

SEQ ID NO: 5673 - DNA, 26 bp, Homo sapiens
gtgaagagttggcagaagaacaggaa

SEQ ID NO: 5674 - DNA, 26 bp, Homo sapiens
tgaagagttggcagaagaacaggaac

SEQ ID NO: 5675 - DNA, 26 bp, Homo sapiens
gaagagttggcagaagaacaggaaca

SEQ ID NO: 5676 - DNA, 26 bp, Homo sapiens
aagagttggcagaagaacaggaacag

SEQ ID NO: 5677 - DNA, 26 bp, Homo sapiens
agagttggcagaagaacaggaacaga

SEQ ID NO: 5678 - DNA, 26 bp, Homo sapiens
gagttggcagaagaacaggaacagag

SEQ ID NO: 5679 - DNA, 26 bp, Homo sapiens
agttggcagaagaacaggaacagaga

SEQ ID NO: 5680 - DNA, 26 bp, Homo sapiens
gttggcagaagaacaggaacagagac

SEQ ID NO: 5681 - DNA, 26 bp, Homo sapiens
ttggcagaagaacaggaacagagaca

SEQ ID NO: 5682 - DNA, 26 bp, Homo sapiens
tggcagaagaacaggaacagagacag

SEQ ID NO: 5683 - DNA, 26 bp, Homo sapiens
ggcagaagaacaggaacagagacaga

SEQ ID NO: 5684 - DNA, 26 bp, Homo sapiens
gcagaagaacaggaacagagacagaa

SEQ ID NO: 5685 - DNA, 26 bp, Homo sapiens
cagaagaacaggaacagagacagaat

SEQ ID NO: 5686 - DNA, 26 bp, Homo sapiens
agaagaacaggaacagagacagaatg

SEQ ID NO: 5687 - DNA, 26 bp, Homo sapiens
gaagaacaggaacagagacagaatgc

SEQ ID NO: 5688 - DNA, 26 bp, Homo sapiens
aagaacaggaacagagacagaatgct

SEQ ID NO: 5689 - DNA, 26 bp, Homo sapiens
agaacaggaacagagacagaatgctg

SEQ ID NO: 5690 - DNA, 26 bp, Homo sapiens
gaacaggaacagagacagaatgctga

SEQ ID NO: 5691 - DNA, 26 bp, Homo sapiens
aacaggaacagagacagaatgctgaa

SEQ ID NO: 5692 - DNA, 26 bp, Homo sapiens
acaggaacagagacagaatgctgaag

SEQ ID NO: 5693 - DNA, 26 bp, Homo sapiens
caggaacagagacagaatgctgaaga

SEQ ID NO: 5694 - DNA, 26 bp, Homo sapiens
aggaacagagacagaatgctgaagat

SEQ ID NO: 5695 - DNA, 26 bp, Homo sapiens
ggaacagagacagaatgctgaagatg

SEQ ID NO: 5696 - DNA, 26 bp, Homo sapiens
gaacagagacagaatgctgaagatga

SEQ ID NO: 5697 - DNA, 26 bp, Homo sapiens
aacagagacagaatgctgaagatgat

SEQ ID NO: 5698 - DNA, 26 bp, Homo sapiens
acagagacagaatgctgaagatgatc

SEQ ID NO: 5699 - DNA, 26 bp, Homo sapiens
cagagacagaatgctgaagatgatcg

SEQ ID NO: 5700 - DNA, 26 bp, Homo sapiens
agagacagaatgctgaagatgatcga

SEQ ID NO: 5701 - DNA, 26 bp, Homo sapiens
gagacagaatgctgaagatgatcgac

SEQ ID NO: 5702 - DNA, 26 bp, Homo sapiens
agacagaatgctgaagatgatcgaca

SEQ ID NO: 5703 - DNA, 26 bp, Homo sapiens
gacagaatgctgaagatgatcgacag

SEQ ID NO: 5704 - DNA, 26 bp, Homo sapiens
acagaatgctgaagatgatcgacagg

SEQ ID NO: 5705 - DNA, 26 bp, Homo sapiens
cagaatgctgaagatgatcgacagga

SEQ ID NO: 5706 - DNA, 26 bp, Homo sapiens
agaatgctgaagatgatcgacaggat

SEQ ID NO: 5707 - DNA, 26 bp, Homo sapiens
gaatgctgaagatgatcgacaggatc

SEQ ID NO: 5708 - DNA, 26 bp, Homo sapiens
aatgctgaagatgatcgacaggatca

SEQ ID NO: 5709 - DNA, 26 bp, Homo sapiens
atgctgaagatgatcgacaggatcat

SEQ ID NO: 5710 - DNA, 26 bp, Homo sapiens
tgctgaagatgatcgacaggatcatg

SEQ ID NO: 5711 - DNA, 26 bp, Homo sapiens
gctgaagatgatcgacaggatcatgg

SEQ ID NO: 5712 - DNA, 26 bp, Homo sapiens
ctgaagatgatcgacaggatcatggt

SEQ ID NO: 5713 - DNA, 26 bp, Homo sapiens
tgaagatgatcgacaggatcatggtg

SEQ ID NO: 5714 - DNA, 26 bp, Homo sapiens
gaagatgatcgacaggatcatggtgg

SEQ ID NO: 5715 - DNA, 26 bp, Homo sapiens
aagatgatcgacaggatcatggtggc

SEQ ID NO: 5716 - DNA, 26 bp, Homo sapiens
agatgatcgacaggatcatggtggcc

SEQ ID NO: 5717 - DNA, 26 bp, Homo sapiens
gatgatcgacaggatcatggtggcct

SEQ ID NO: 5718 - DNA, 26 bp, Homo sapiens
atgatcgacaggatcatggtggcctg

SEQ ID NO: 5719 - DNA, 26 bp, Homo sapiens
tgatcgacaggatcatggtggcctgg

SEQ ID NO: 5720 - DNA, 26 bp, Homo sapiens
gatcgacaggatcatggtggcctgga

SEQ ID NO: 5721 - DNA, 26 bp, Homo sapiens
atcgacaggatcatggtggcctggac

SEQ ID NO: 5722 - DNA, 26 bp, Homo sapiens
tcgacaggatcatggtggcctggaca

SEQ ID NO: 5723 - DNA, 26 bp, Homo sapiens
cgacaggatcatggtggcctggacag

SEQ ID NO: 5724 - DNA, 26 bp, Homo sapiens
gacaggatcatggtggcctggacaga

SEQ ID NO: 5725 - DNA, 26 bp, Homo sapiens
acaggatcatggtggcctggacagac

SEQ ID NO: 5726 - DNA, 26 bp, Homo sapiens
caggatcatggtggcctggacagact

SEQ ID NO: 5727 - DNA, 26 bp, Homo sapiens
aggatcatggtggcctggacagactg

SEQ ID NO: 5728 - DNA, 26 bp, Homo sapiens
ggatcatggtggcctggacagactgc

SEQ ID NO: 5729 - DNA, 26 bp, Homo sapiens
gatcatggtggcctggacagactgca

SEQ ID NO: 5730 - DNA, 26 bp, Homo sapiens
atcatggtggcctggacagactgcag

SEQ ID NO: 5731 - DNA, 26 bp, Homo sapiens
tcatggtggcctggacagactgcagc

SEQ ID NO: 5732 - DNA, 26 bp, Homo sapiens
catggtggcctggacagactgcagcc

SEQ ID NO: 5733 - DNA, 26 bp, Homo sapiens
atggtggcctggacagactgcagcca

SEQ ID NO: 5734 - DNA, 26 bp, Homo sapiens
tggtggcctggacagactgcagccat

SEQ ID NO: 5735 - DNA, 26 bp, Homo sapiens
ggtggcctggacagactgcagccatt

SEQ ID NO: 5736 - DNA, 26 bp, Homo sapiens
gtggcctggacagactgcagccattc

SEQ ID NO: 5737 - DNA, 26 bp, Homo sapiens
tggcctggacagactgcagccattcg

SEQ ID NO: 5738 - DNA, 26 bp, Homo sapiens
ggcctggacagactgcagccattcgt

SEQ ID NO: 5739 - DNA, 26 bp, Homo sapiens
gcctggacagactgcagccattcgtt

SEQ ID NO: 5740 - DNA, 26 bp, Homo sapiens
cctggacagactgcagccattcgttt

SEQ ID NO: 5741 - DNA, 26 bp, Homo sapiens
ctggacagactgcagccattcgtttg

SEQ ID NO: 5742 - DNA, 26 bp, Homo sapiens
tggacagactgcagccattcgtttgg

SEQ ID NO: 5743 - DNA, 26 bp, Homo sapiens
ggacagactgcagccattcgtttggt

SEQ ID NO: 5744 - DNA, 26 bp, Homo sapiens
gacagactgcagccattcgtttggtg

SEQ ID NO: 5745 - DNA, 26 bp, Homo sapiens
acagactgcagccattcgtttggtga

SEQ ID NO: 5746 - DNA, 26 bp, Homo sapiens
cagactgcagccattcgtttggtgat

SEQ ID NO: 5747 - DNA, 26 bp, Homo sapiens
agactgcagccattcgtttggtgatg

SEQ ID NO: 5748 - DNA, 26 bp, Homo sapiens
gactgcagccattcgtttggtgatga

SEQ ID NO: 5749 - DNA, 26 bp, Homo sapiens
actgcagccattcgtttggtgatgat

SEQ ID NO: 5750 - DNA, 26 bp, Homo sapiens
ctgcagccattcgtttggtgatgatg

SEQ ID NO: 5751 - DNA, 26 bp, Homo sapiens
tgcagccattcgtttggtgatgatga

SEQ ID NO: 5752 - DNA, 26 bp, Homo sapiens
gcagccattcgtttggtgatgatgag

SEQ ID NO: 5753 - DNA, 26 bp, Homo sapiens
cagccattcgtttggtgatgatgaga

SEQ ID NO: 5754 - DNA, 26 bp, Homo sapiens
agccattcgtttggtgatgatgagaa

SEQ ID NO: 5755 - DNA, 26 bp, Homo sapiens
gccattcgtttggtgatgatgagaaa

SEQ ID NO: 5756 - DNA, 26 bp, Homo sapiens
ccattcgtttggtgatgatgagaaac

SEQ ID NO: 5757 - DNA, 26 bp, Homo sapiens
cattcgtttggtgatgatgagaaaca

SEQ ID NO: 5758 - DNA, 26 bp, Homo sapiens
attcgtttggtgatgatgagaaacag

SEQ ID NO: 5759 - DNA, 26 bp, Homo sapiens
ttcgtttggtgatgatgagaaacagt

SEQ ID NO: 5760 - DNA, 26 bp, Homo sapiens
tcgtttggtgatgatgagaaacagtg

SEQ ID NO: 5761 - DNA, 26 bp, Homo sapiens
cgtttggtgatgatgagaaacagtgg

SEQ ID NO: 5762 - DNA, 26 bp, Homo sapiens
gtttggtgatgatgagaaacagtggt

SEQ ID NO: 5763 - DNA, 26 bp, Homo sapiens
tttggtgatgatgagaaacagtggtg

SEQ ID NO: 5764 - DNA, 26 bp, Homo sapiens
ttggtgatgatgagaaacagtggtgg

SEQ ID NO: 5765 - DNA, 26 bp, Homo sapiens
tggtgatgatgagaaacagtggtgga

SEQ ID NO: 5766 - DNA, 26 bp, Homo sapiens
ggtgatgatgagaaacagtggtggac

SEQ ID NO: 5767 - DNA, 26 bp, Homo sapiens
gtgatgatgagaaacagtggtggaca

SEQ ID NO: 5768 - DNA, 26 bp, Homo sapiens
tgatgatgagaaacagtggtggacat

SEQ ID NO: 5769 - DNA, 26 bp, Homo sapiens
gatgatgagaaacagtggtggacatt

SEQ ID NO: 5770 - DNA, 26 bp, Homo sapiens
atgatgagaaacagtggtggacattt

SEQ ID NO: 5771 - DNA, 26 bp, Homo sapiens
tgatgagaaacagtggtggacatttc

SEQ ID NO: 5772 - DNA, 26 bp, Homo sapiens
gatgagaaacagtggtggacatttcc

SEQ ID NO: 5773 - DNA, 26 bp, Homo sapiens
atgagaaacagtggtggacatttcct

SEQ ID NO: 5774 - DNA, 26 bp, Homo sapiens
tgagaaacagtggtggacatttcctg

SEQ ID NO: 5775 - DNA, 26 bp, Homo sapiens
gagaaacagtggtggacatttcctga

SEQ ID NO: 5776 - DNA, 26 bp, Homo sapiens
agaaacagtggtggacatttcctgag

SEQ ID NO: 5777 - DNA, 26 bp, Homo sapiens
gaaacagtggtggacatttcctgagg

SEQ ID NO: 5778 - DNA, 26 bp, Homo sapiens
aaacagtggtggacatttcctgagga

SEQ ID NO: 5779 - DNA, 26 bp, Homo sapiens
aacagtggtggacatttcctgaggaa

SEQ ID NO: 5780 - DNA, 26 bp, Homo sapiens
acagtggtggacatttcctgaggaag

SEQ ID NO: 5781 - DNA, 26 bp, Homo sapiens
cagtggtggacatttcctgaggaaga

SEQ ID NO: 5782 - DNA, 26 bp, Homo sapiens
agtggtggacatttcctgaggaagag

SEQ ID NO: 5783 - DNA, 26 bp, Homo sapiens
gtggtggacatttcctgaggaagagg

SEQ ID NO: 5784 - DNA, 26 bp, Homo sapiens
tggtggacatttcctgaggaagaggt

SEQ ID NO: 5785 - DNA, 26 bp, Homo sapiens
ggtggacatttcctgaggaagaggtg

SEQ ID NO: 5786 - DNA, 26 bp, Homo sapiens
gtggacatttcctgaggaagaggtgc

SEQ ID NO: 5787 - DNA, 26 bp, Homo sapiens
tggacatttcctgaggaagaggtgct

SEQ ID NO: 5788 - DNA, 26 bp, Homo sapiens
ggacatttcctgaggaagaggtgcta

SEQ ID NO: 5789 - DNA, 26 bp, Homo sapiens
gacatttcctgaggaagaggtgctac

SEQ ID NO: 5790 - DNA, 26 bp, Homo sapiens
acatttcctgaggaagaggtgctaca

SEQ ID NO: 5791 - DNA, 26 bp, Homo sapiens
catttcctgaggaagaggtgctacag

SEQ ID NO: 5792 - DNA, 26 bp, Homo sapiens
atttcctgaggaagaggtgctacagt

SEQ ID NO: 5793 - DNA, 26 bp, Homo sapiens
tttcctgaggaagaggtgctacagtt

SEQ ID NO: 5794 - DNA, 26 bp, Homo sapiens
ttcctgaggaagaggtgctacagttc

SEQ ID NO: 5795 - DNA, 26 bp, Homo sapiens
tcctgaggaagaggtgctacagttct

SEQ ID NO: 5796 - DNA, 26 bp, Homo sapiens
cctgaggaagaggtgctacagttctg

SEQ ID NO: 5797 - DNA, 26 bp, Homo sapiens
ctgaggaagaggtgctacagttctgc

SEQ ID NO: 5798 - DNA, 26 bp, Homo sapiens
tgaggaagaggtgctacagttctgcc

SEQ ID NO: 5799 - DNA, 26 bp, Homo sapiens
gaggaagaggtgctacagttctgcca

SEQ ID NO: 5800 - DNA, 26 bp, Homo sapiens
aggaagaggtgctacagttctgccag

SEQ ID NO: 5801 - DNA, 26 bp, Homo sapiens
ggaagaggtgctacagttctgccaga

SEQ ID NO: 5802 - DNA, 26 bp, Homo sapiens
gaagaggtgctacagttctgccagag

SEQ ID NO: 5803 - DNA, 26 bp, Homo sapiens
aagaggtgctacagttctgccagaga

SEQ ID NO: 5804 - DNA, 26 bp, Homo sapiens
agaggtgctacagttctgccagagat

SEQ ID NO: 5805 - DNA, 26 bp, Homo sapiens
gaggtgctacagttctgccagagatc

SEQ ID NO: 5806 - DNA, 26 bp, Homo sapiens
aggtgctacagttctgccagagatca

SEQ ID NO: 5807 - DNA, 26 bp, Homo sapiens
ggtgctacagttctgccagagatcag

SEQ ID NO: 5808 - DNA, 26 bp, Homo sapiens
gtgctacagttctgccagagatcagt

SEQ ID NO: 5809 - DNA, 26 bp, Homo sapiens
tgctacagttctgccagagatcagtt

SEQ ID NO: 5810 - DNA, 26 bp, Homo sapiens
gctacagttctgccagagatcagttg

SEQ ID NO: 5811 - DNA, 26 bp, Homo sapiens
ctacagttctgccagagatcagttgc

SEQ ID NO: 5812 - DNA, 26 bp, Homo sapiens
tacagttctgccagagatcagttgcg

SEQ ID NO: 5813 - DNA, 26 bp, Homo sapiens
acagttctgccagagatcagttgcgt

SEQ ID NO: 5814 - DNA, 26 bp, Homo sapiens
cagttctgccagagatcagttgcgtg

SEQ ID NO: 5815 - DNA, 26 bp, Homo sapiens
agttctgccagagatcagttgcgtgt

SEQ ID NO: 5816 - DNA, 26 bp, Homo sapiens
gttctgccagagatcagttgcgtgtc

SEQ ID NO: 5817 - DNA, 26 bp, Homo sapiens
ttctgccagagatcagttgcgtgtcc

SEQ ID NO: 5818 - DNA, 26 bp, Homo sapiens
tctgccagagatcagttgcgtgtcca

SEQ ID NO: 5819 - DNA, 26 bp, Homo sapiens
ctgccagagatcagttgcgtgtccat

SEQ ID NO: 5820 - DNA, 26 bp, Homo sapiens
tgccagagatcagttgcgtgtccatt

SEQ ID NO: 5821 - DNA, 26 bp, Homo sapiens
gccagagatcagttgcgtgtccattg

SEQ ID NO: 5822 - DNA, 26 bp, Homo sapiens
ccagagatcagttgcgtgtccattgc

SEQ ID NO: 5823 - DNA, 26 bp, Homo sapiens
cagagatcagttgcgtgtccattgcc

SEQ ID NO: 5824 - DNA, 26 bp, Homo sapiens
agagatcagttgcgtgtccattgccc

SEQ ID NO: 5825 - DNA, 26 bp, Homo sapiens
gagatcagttgcgtgtccattgccca

SEQ ID NO: 5826 - DNA, 26 bp, Homo sapiens
agatcagttgcgtgtccattgcccac

SEQ ID NO: 5827 - DNA, 26 bp, Homo sapiens
gatcagttgcgtgtccattgcccacg

SEQ ID NO: 5828 - DNA, 26 bp, Homo sapiens
atcagttgcgtgtccattgcccacga

SEQ ID NO: 5829 - DNA, 26 bp, Homo sapiens
tcagttgcgtgtccattgcccacgat

SEQ ID NO: 5830 - DNA, 26 bp, Homo sapiens
cagttgcgtgtccattgcccacgatc

SEQ ID NO: 5831 - DNA, 26 bp, Homo sapiens
agttgcgtgtccattgcccacgatcc

SEQ ID NO: 5832 - DNA, 26 bp, Homo sapiens
gttgcgtgtccattgcccacgatcca

SEQ ID NO: 5833 - DNA, 26 bp, Homo sapiens
ttgcgtgtccattgcccacgatccat

SEQ ID NO: 5834 - DNA, 26 bp, Homo sapiens
tgcgtgtccattgcccacgatccatt

SEQ ID NO: 5835 - DNA, 26 bp, Homo sapiens
gcgtgtccattgcccacgatccattg

SEQ ID NO: 5836 - DNA, 26 bp, Homo sapiens
cgtgtccattgcccacgatccattgg

SEQ ID NO: 5837 - DNA, 26 bp, Homo sapiens
gtgtccattgcccacgatccattggc

SEQ ID NO: 5838 - DNA, 26 bp, Homo sapiens
tgtccattgcccacgatccattggct

SEQ ID NO: 5839 - DNA, 26 bp, Homo sapiens
gtccattgcccacgatccattggctg

SEQ ID NO: 5840 - DNA, 26 bp, Homo sapiens
tccattgcccacgatccattggctga

SEQ ID NO: 5841 - DNA, 26 bp, Homo sapiens
ccattgcccacgatccattggctgac

SEQ ID NO: 5842 - DNA, 26 bp, Homo sapiens
cattgcccacgatccattggctgacg

SEQ ID NO: 5843 - DNA, 26 bp, Homo sapiens
attgcccacgatccattggctgacga

SEQ ID NO: 5844 - DNA, 26 bp, Homo sapiens
ttgcccacgatccattggctgacgat

SEQ ID NO: 5845 - DNA, 26 bp, Homo sapiens
tgcccacgatccattggctgacgatc

SEQ ID NO: 5846 - DNA, 26 bp, Homo sapiens
gcccacgatccattggctgacgatcg

SEQ ID NO: 5847 - DNA, 26 bp, Homo sapiens
cccacgatccattggctgacgatcgt

SEQ ID NO: 5848 - DNA, 26 bp, Homo sapiens
ccacgatccattggctgacgatcgtg

SEQ ID NO: 5849 - DNA, 26 bp, Homo sapiens
cacgatccattggctgacgatcgtgg

SEQ ID NO: 5850 - DNA, 26 bp, Homo sapiens
acgatccattggctgacgatcgtgga

SEQ ID NO: 5851 - DNA, 26 bp, Homo sapiens
cgatccattggctgacgatcgtggag

SEQ ID NO: 5852 - DNA, 26 bp, Homo sapiens
gatccattggctgacgatcgtggaga

SEQ ID NO: 5853 - DNA, 26 bp, Homo sapiens
atccattggctgacgatcgtggagac

SEQ ID NO: 5854 - DNA, 26 bp, Homo sapiens
tccattggctgacgatcgtggagacg

SEQ ID NO: 5855 - DNA, 26 bp, Homo sapiens
ccattggctgacgatcgtggagacga

SEQ ID NO: 5856 - DNA, 26 bp, Homo sapiens
cattggctgacgatcgtggagacgaa

SEQ ID NO: 5857 - DNA, 26 bp, Homo sapiens
attggctgacgatcgtggagacgaac

SEQ ID NO: 5858 - DNA, 26 bp, Homo sapiens
ttggctgacgatcgtggagacgaaca

SEQ ID NO: 5859 - DNA, 26 bp, Homo sapiens
tggctgacgatcgtggagacgaacag

SEQ ID NO: 5860 - DNA, 26 bp, Homo sapiens
ggctgacgatcgtggagacgaacagc

SEQ ID NO: 5861 - DNA, 26 bp, Homo sapiens
gctgacgatcgtggagacgaacagca

SEQ ID NO: 5862 - DNA, 26 bp, Homo sapiens
ctgacgatcgtggagacgaacagcag

SEQ ID NO: 5863 - DNA, 26 bp, Homo sapiens
tgacgatcgtggagacgaacagcagc

SEQ ID NO: 5864 - DNA, 26 bp, Homo sapiens
gacgatcgtggagacgaacagcagca

SEQ ID NO: 5865 - DNA, 26 bp, Homo sapiens
acgatcgtggagacgaacagcagcac

SEQ ID NO: 5866 - DNA, 26 bp, Homo sapiens
cgatcgtggagacgaacagcagcacc

SEQ ID NO: 5867 - DNA, 26 bp, Homo sapiens
gatcgtggagacgaacagcagcacca

SEQ ID NO: 5868 - DNA, 26 bp, Homo sapiens
atcgtggagacgaacagcagcaccag

SEQ ID NO: 5869 - DNA, 26 bp, Homo sapiens
tcgtggagacgaacagcagcaccagc

SEQ ID NO: 5870 - DNA, 26 bp, Homo sapiens
cgtggagacgaacagcagcaccagca

SEQ ID NO: 5871 - DNA, 26 bp, Homo sapiens
gtggagacgaacagcagcaccagcac

SEQ ID NO: 5872 - DNA, 26 bp, Homo sapiens
tggagacgaacagcagcaccagcacc

SEQ ID NO: 5873 - DNA, 26 bp, Homo sapiens
ggagacgaacagcagcaccagcaccg

SEQ ID NO: 5874 - DNA, 26 bp, Homo sapiens
gagacgaacagcagcaccagcaccgc

SEQ ID NO: 5875 - DNA, 26 bp, Homo sapiens
agacgaacagcagcaccagcaccgcg

SEQ ID NO: 5876 - DNA, 26 bp, Homo sapiens
gacgaacagcagcaccagcaccgcga

SEQ ID NO: 5877 - DNA, 26 bp, Homo sapiens
acgaacagcagcaccagcaccgcgac

SEQ ID NO: 5878 - DNA, 26 bp, Homo sapiens
cgaacagcagcaccagcaccgcgacg

SEQ ID NO: 5879 - DNA, 26 bp, Homo sapiens
gaacagcagcaccagcaccgcgacgt

SEQ ID NO: 5880 - DNA, 26 bp, Homo sapiens
aacagcagcaccagcaccgcgacgtg

SEQ ID NO: 5881 - DNA, 26 bp, Homo sapiens
acagcagcaccagcaccgcgacgtgg

SEQ ID NO: 5882 - DNA, 26 bp, Homo sapiens
cagcagcaccagcaccgcgacgtgga

SEQ ID NO: 5883 - DNA, 26 bp, Homo sapiens
agcagcaccagcaccgcgacgtggag

SEQ ID NO: 5884 - DNA, 26 bp, Homo sapiens
gcagcaccagcaccgcgacgtggagg

SEQ ID NO: 5885 - DNA, 26 bp, Homo sapiens
cagcaccagcaccgcgacgtggagga

SEQ ID NO: 5886 - DNA, 26 bp, Homo sapiens
agcaccagcaccgcgacgtggaggac

SEQ ID NO: 5887 - DNA, 26 bp, Homo sapiens
gcaccagcaccgcgacgtggaggacg

SEQ ID NO: 5888 - DNA, 26 bp, Homo sapiens
caccagcaccgcgacgtggaggacga

SEQ ID NO: 5889 - DNA, 26 bp, Homo sapiens
accagcaccgcgacgtggaggacgat

SEQ ID NO: 5890 - DNA, 26 bp, Homo sapiens
ccagcaccgcgacgtggaggacgatg

SEQ ID NO: 5891 - DNA, 26 bp, Homo sapiens
cagcaccgcgacgtggaggacgatga

SEQ ID NO: 5892 - DNA, 26 bp, Homo sapiens
agcaccgcgacgtggaggacgatgat

SEQ ID NO: 5893 - DNA, 26 bp, Homo sapiens
gcaccgcgacgtggaggacgatgata

SEQ ID NO: 5894 - DNA, 26 bp, Homo sapiens
caccgcgacgtggaggacgatgatac

SEQ ID NO: 5895 - DNA, 26 bp, Homo sapiens
accgcgacgtggaggacgatgatact

SEQ ID NO: 5896 - DNA, 26 bp, Homo sapiens
ccgcgacgtggaggacgatgatactc

SEQ ID NO: 5897 - DNA, 26 bp, Homo sapiens
cgcgacgtggaggacgatgatactca

SEQ ID NO: 5898 - DNA, 26 bp, Homo sapiens
gcgacgtggaggacgatgatactcag

SEQ ID NO: 5899 - DNA, 26 bp, Homo sapiens
cgacgtggaggacgatgatactcagc

SEQ ID NO: 5900 - DNA, 26 bp, Homo sapiens
gacgtggaggacgatgatactcagca

SEQ ID NO: 5901 - DNA, 26 bp, Homo sapiens
acgtggaggacgatgatactcagcaa

SEQ ID NO: 5902 - DNA, 26 bp, Homo sapiens
cgtggaggacgatgatactcagcaac

SEQ ID NO: 5903 - DNA, 26 bp, Homo sapiens
gtggaggacgatgatactcagcaaca

SEQ ID NO: 5904 - DNA, 26 bp, Homo sapiens
tggaggacgatgatactcagcaacag

SEQ ID NO: 5905 - DNA, 26 bp, Homo sapiens
ggaggacgatgatactcagcaacagg

SEQ ID NO: 5906 - DNA, 26 bp, Homo sapiens
gaggacgatgatactcagcaacagga

SEQ ID NO: 5907 - DNA, 26 bp, Homo sapiens
aggacgatgatactcagcaacaggag

SEQ ID NO: 5908 - DNA, 26 bp, Homo sapiens
ggacgatgatactcagcaacaggagg

SEQ ID NO: 5909 - DNA, 26 bp, Homo sapiens
gacgatgatactcagcaacaggagga

SEQ ID NO: 5910 - DNA, 26 bp, Homo sapiens
acgatgatactcagcaacaggaggag

SEQ ID NO: 5911 - DNA, 26 bp, Homo sapiens
cgatgatactcagcaacaggaggagc

SEQ ID NO: 5912 - DNA, 26 bp, Homo sapiens
gatgatactcagcaacaggaggagca

SEQ ID NO: 5913 - DNA, 26 bp, Homo sapiens
atgatactcagcaacaggaggagcat

SEQ ID NO: 5914 - DNA, 26 bp, Homo sapiens
tgatactcagcaacaggaggagcatt

SEQ ID NO: 5915 - DNA, 26 bp, Homo sapiens
gatactcagcaacaggaggagcattc

SEQ ID NO: 5916 - DNA, 26 bp, Homo sapiens
atactcagcaacaggaggagcattct

SEQ ID NO: 5917 - DNA, 26 bp, Homo sapiens
tactcagcaacaggaggagcattctg

SEQ ID NO: 5918 - DNA, 26 bp, Homo sapiens
actcagcaacaggaggagcattctgg

SEQ ID NO: 5919 - DNA, 26 bp, Homo sapiens
ctcagcaacaggaggagcattctggc

SEQ ID NO: 5920 - DNA, 26 bp, Homo sapiens
tcagcaacaggaggagcattctggcg

SEQ ID NO: 5921 - DNA, 26 bp, Homo sapiens
cagcaacaggaggagcattctggcgg

SEQ ID NO: 5922 - DNA, 26 bp, Homo sapiens
agcaacaggaggagcattctggcggc

SEQ ID NO: 5923 - DNA, 26 bp, Homo sapiens
gcaacaggaggagcattctggcggca

SEQ ID NO: 5924 - DNA, 26 bp, Homo sapiens
caacaggaggagcattctggcggcaa

SEQ ID NO: 5925 - DNA, 26 bp, Homo sapiens
aacaggaggagcattctggcggcaag

SEQ ID NO: 5926 - DNA, 26 bp, Homo sapiens
acaggaggagcattctggcggcaagt

SEQ ID NO: 5927 - DNA, 26 bp, Homo sapiens
caggaggagcattctggcggcaagtt

SEQ ID NO: 5928 - DNA, 26 bp, Homo sapiens
aggaggagcattctggcggcaagttc

SEQ ID NO: 5929 - DNA, 26 bp, Homo sapiens
ggaggagcattctggcggcaagttct

SEQ ID NO: 5930 - DNA, 26 bp, Homo sapiens
gaggagcattctggcggcaagttctg

SEQ ID NO: 5931 - DNA, 26 bp, Homo sapiens
aggagcattctggcggcaagttctgc

SEQ ID NO: 5932 - DNA, 26 bp, Homo sapiens
ggagcattctggcggcaagttctgct

SEQ ID NO: 5933 - DNA, 26 bp, Homo sapiens
gagcattctggcggcaagttctgctc

SEQ ID NO: 5934 - DNA, 26 bp, Homo sapiens
agcattctggcggcaagttctgctca

SEQ ID NO: 5935 - DNA, 26 bp, Homo sapiens
gcattctggcggcaagttctgctcag

SEQ ID NO: 5936 - DNA, 26 bp, Homo sapiens
cattctggcggcaagttctgctcagc

SEQ ID NO: 5937 - DNA, 26 bp, Homo sapiens
attctggcggcaagttctgctcagcg

SEQ ID NO: 5938 - DNA, 26 bp, Homo sapiens
ttctggcggcaagttctgctcagcgg

SEQ ID NO: 5939 - DNA, 26 bp, Homo sapiens
tctggcggcaagttctgctcagcgga

SEQ ID NO: 5940 - DNA, 26 bp, Homo sapiens
ctggcggcaagttctgctcagcggag

SEQ ID NO: 5941 - DNA, 26 bp, Homo sapiens
tggcggcaagttctgctcagcggagt

SEQ ID NO: 5942 - DNA, 26 bp, Homo sapiens
ggcggcaagttctgctcagcggagtt

SEQ ID NO: 5943 - DNA, 26 bp, Homo sapiens
gcggcaagttctgctcagcggagttt

SEQ ID NO: 5944 - DNA, 26 bp, Homo sapiens
cggcaagttctgctcagcggagtttc

SEQ ID NO: 5945 - DNA, 26 bp, Homo sapiens
ggcaagttctgctcagcggagtttct

SEQ ID NO: 5946 - DNA, 26 bp, Homo sapiens
gcaagttctgctcagcggagtttctg

SEQ ID NO: 5947 - DNA, 26 bp, Homo sapiens
caagttctgctcagcggagtttctgc

SEQ ID NO: 5948 - DNA, 26 bp, Homo sapiens
aagttctgctcagcggagtttctgcc

SEQ ID NO: 5949 - DNA, 26 bp, Homo sapiens
agttctgctcagcggagtttctgccc

SEQ ID NO: 5950 - DNA, 26 bp, Homo sapiens
gttctgctcagcggagtttctgcccg

SEQ ID NO: 5951 - DNA, 26 bp, Homo sapiens
ttctgctcagcggagtttctgcccgg

SEQ ID NO: 5952 - DNA, 26 bp, Homo sapiens
tctgctcagcggagtttctgcccggc

SEQ ID NO: 5953 - DNA, 26 bp, Homo sapiens
ctgctcagcggagtttctgcccggcc

SEQ ID NO: 5954 - DNA, 26 bp, Homo sapiens
tgctcagcggagtttctgcccggcca

SEQ ID NO: 5955 - DNA, 26 bp, Homo sapiens
gctcagcggagtttctgcccggccaa

SEQ ID NO: 5956 - DNA, 26 bp, Homo sapiens
ctcagcggagtttctgcccggccaaa

SEQ ID NO: 5957 - DNA, 26 bp, Homo sapiens
tcagcggagtttctgcccggccaaac

SEQ ID NO: 5958 - DNA, 26 bp, Homo sapiens
cagcggagtttctgcccggccaaaca

SEQ ID NO: 5959 - DNA, 26 bp, Homo sapiens
agcggagtttctgcccggccaaacag

SEQ ID NO: 5960 - DNA, 26 bp, Homo sapiens
gcggagtttctgcccggccaaacagc

SEQ ID NO: 5961 - DNA, 26 bp, Homo sapiens
cggagtttctgcccggccaaacagcg

SEQ ID NO: 5962 - DNA, 26 bp, Homo sapiens
ggagtttctgcccggccaaacagcgt

SEQ ID NO: 5963 - DNA, 26 bp, Homo sapiens
gagtttctgcccggccaaacagcgta

SEQ ID NO: 5964 - DNA, 26 bp, Homo sapiens
agtttctgcccggccaaacagcgtaa

SEQ ID NO: 5965 - DNA, 26 bp, Homo sapiens
gtttctgcccggccaaacagcgtaac

SEQ ID NO: 5966 - DNA, 26 bp, Homo sapiens
tttctgcccggccaaacagcgtaacc

SEQ ID NO: 5967 - DNA, 26 bp, Homo sapiens
ttctgcccggccaaacagcgtaaccc

SEQ ID NO: 5968 - DNA, 26 bp, Homo sapiens
tctgcccggccaaacagcgtaacccc

SEQ ID NO: 5969 - DNA, 26 bp, Homo sapiens
ctgcccggccaaacagcgtaacccct

SEQ ID NO: 5970 - DNA, 26 bp, Homo sapiens
tgcccggccaaacagcgtaacccctt

SEQ ID NO: 5971 - DNA, 26 bp, Homo sapiens
gcccggccaaacagcgtaaccccttc

SEQ ID NO: 5972 - DNA, 26 bp, Homo sapiens
cccggccaaacagcgtaaccccttct

SEQ ID NO: 5973 - DNA, 26 bp, Homo sapiens
ccggccaaacagcgtaaccccttctt

SEQ ID NO: 5974 - DNA, 26 bp, Homo sapiens
cggccaaacagcgtaaccccttcttc

SEQ ID NO: 5975 - DNA, 26 bp, Homo sapiens
ggccaaacagcgtaaccccttcttcc

SEQ ID NO: 5976 - DNA, 26 bp, Homo sapiens
gccaaacagcgtaaccccttcttcca

SEQ ID NO: 5977 - DNA, 26 bp, Homo sapiens
ccaaacagcgtaaccccttcttccaa

SEQ ID NO: 5978 - DNA, 26 bp, Homo sapiens
caaacagcgtaaccccttcttccaag

SEQ ID NO: 5979 - DNA, 26 bp, Homo sapiens
aaacagcgtaaccccttcttccaagc

SEQ ID NO: 5980 - DNA, 26 bp, Homo sapiens
aacagcgtaaccccttcttccaagca

SEQ ID NO: 5981 - DNA, 26 bp, Homo sapiens
acagcgtaaccccttcttccaagcag

SEQ ID NO: 5982 - DNA, 26 bp, Homo sapiens
cagcgtaaccccttcttccaagcaga

SEQ ID NO: 5983 - DNA, 26 bp, Homo sapiens
agcgtaaccccttcttccaagcagat

SEQ ID NO: 5984 - DNA, 26 bp, Homo sapiens
gcgtaaccccttcttccaagcagatt

SEQ ID NO: 5985 - DNA, 26 bp, Homo sapiens
cgtaaccccttcttccaagcagattt

SEQ ID NO: 5986 - DNA, 26 bp, Homo sapiens
gtaaccccttcttccaagcagatttc

SEQ ID NO: 5987 - DNA, 26 bp, Homo sapiens
taaccccttcttccaagcagatttct

SEQ ID NO: 5988 - DNA, 26 bp, Homo sapiens
aaccccttcttccaagcagatttctt

SEQ ID NO: 5989 - DNA, 26 bp, Homo sapiens
accccttcttccaagcagatttcttt

SEQ ID NO: 5990 - DNA, 26 bp, Homo sapiens
ccccttcttccaagcagatttctttg

SEQ ID NO: 5991 - DNA, 26 bp, Homo sapiens
cccttcttccaagcagatttctttgc

SEQ ID NO: 5992 - DNA, 26 bp, Homo sapiens
ccttcttccaagcagatttctttgca

SEQ ID NO: 5993 - DNA, 26 bp, Homo sapiens
cttcttccaagcagatttctttgcag

SEQ ID NO: 5994 - DNA, 26 bp, Homo sapiens
ttcttccaagcagatttctttgcagc

SEQ ID NO: 5995 - DNA, 26 bp, Homo sapiens
tcttccaagcagatttctttgcagcc

SEQ ID NO: 5996 - DNA, 26 bp, Homo sapiens
cttccaagcagatttctttgcagcca

SEQ ID NO: 5997 - DNA, 26 bp, Homo sapiens
ttccaagcagatttctttgcagccaa

SEQ ID NO: 5998 - DNA, 26 bp, Homo sapiens
tccaagcagatttctttgcagccaaa

SEQ ID NO: 5999 - DNA, 26 bp, Homo sapiens
ccaagcagatttctttgcagccaaat

SEQ ID NO: 6000 - DNA, 26 bp, Homo sapiens
caagcagatttctttgcagccaaatg

SEQ ID NO: 6001 - DNA, 26 bp, Homo sapiens
aagcagatttctttgcagccaaatgc

SEQ ID NO: 6002 - DNA, 26 bp, Homo sapiens
agcagatttctttgcagccaaatgca

SEQ ID NO: 6003 - DNA, 26 bp, Homo sapiens
gcagatttctttgcagccaaatgcaa

SEQ ID NO: 6004 - DNA, 26 bp, Homo sapiens
cagatttctttgcagccaaatgcaag

SEQ ID NO: 6005 - DNA, 26 bp, Homo sapiens
agatttctttgcagccaaatgcaagg

SEQ ID NO: 6006 - DNA, 26 bp, Homo sapiens
gatttctttgcagccaaatgcaaggg

SEQ ID NO: 6007 - DNA, 26 bp, Homo sapiens
atttctttgcagccaaatgcaaggga

SEQ ID NO: 6008 - DNA, 26 bp, Homo sapiens
tttctttgcagccaaatgcaagggat

SEQ ID NO: 6009 - DNA, 26 bp, Homo sapiens
ttctttgcagccaaatgcaagggatg

SEQ ID NO: 6010 - DNA, 26 bp, Homo sapiens
tctttgcagccaaatgcaagggatgt

SEQ ID NO: 6011 - DNA, 26 bp, Homo sapiens
ctttgcagccaaatgcaagggatgtt

SEQ ID NO: 6012 - DNA, 26 bp, Homo sapiens
tttgcagccaaatgcaagggatgtta

SEQ ID NO: 6013 - DNA, 26 bp, Homo sapiens
ttgcagccaaatgcaagggatgttaa

SEQ ID NO: 6014 - DNA, 26 bp, Homo sapiens
tgcagccaaatgcaagggatgttaag

SEQ ID NO: 6015 - DNA, 26 bp, Homo sapiens
gcagccaaatgcaagggatgttaagg

SEQ ID NO: 6016 - DNA, 26 bp, Homo sapiens
cagccaaatgcaagggatgttaaggc

SEQ ID NO: 6017 - DNA, 26 bp, Homo sapiens
agccaaatgcaagggatgttaaggca

SEQ ID NO: 6018 - DNA, 26 bp, Homo sapiens
gccaaatgcaagggatgttaaggcaa

SEQ ID NO: 6019 - DNA, 26 bp, Homo sapiens
ccaaatgcaagggatgttaaggcaag

SEQ ID NO: 6020 - DNA, 26 bp, Homo sapiens
caaatgcaagggatgttaaggcaaga

SEQ ID NO: 6021 - DNA, 26 bp, Homo sapiens
aaatgcaagggatgttaaggcaagac

SEQ ID NO: 6022 - DNA, 26 bp, Homo sapiens
aatgcaagggatgttaaggcaagacc

SEQ ID NO: 6023 - DNA, 26 bp, Homo sapiens
atgcaagggatgttaaggcaagaccc

SEQ ID NO: 6024 - DNA, 26 bp, Homo sapiens
tgcaagggatgttaaggcaagaccct

SEQ ID NO: 6025 - DNA, 26 bp, Homo sapiens
gcaagggatgttaaggcaagaccctc

SEQ ID NO: 6026 - DNA, 26 bp, Homo sapiens
caagggatgttaaggcaagaccctcc

SEQ ID NO: 6027 - DNA, 26 bp, Homo sapiens
aagggatgttaaggcaagaccctccc

SEQ ID NO: 6028 - DNA, 26 bp, Homo sapiens
agggatgttaaggcaagaccctcccc

SEQ ID NO: 6029 - DNA, 26 bp, Homo sapiens
gggatgttaaggcaagaccctcccca

SEQ ID NO: 6030 - DNA, 26 bp, Homo sapiens
ggatgttaaggcaagaccctccccac

SEQ ID NO: 6031 - DNA, 26 bp, Homo sapiens
gatgttaaggcaagaccctccccaca

SEQ ID NO: 6032 - DNA, 26 bp, Homo sapiens
atgttaaggcaagaccctccccacag

SEQ ID NO: 6033 - DNA, 26 bp, Homo sapiens
tgttaaggcaagaccctccccacagg

SEQ ID NO: 6034 - DNA, 26 bp, Homo sapiens
gttaaggcaagaccctccccacaggg

SEQ ID NO: 6035 - DNA, 26 bp, Homo sapiens
ttaaggcaagaccctccccacagggc

SEQ ID NO: 6036 - DNA, 26 bp, Homo sapiens
taaggcaagaccctccccacagggca

SEQ ID NO: 6037 - DNA, 26 bp, Homo sapiens
aaggcaagaccctccccacagggcag

SEQ ID NO: 6038 - DNA, 26 bp, Homo sapiens
aggcaagaccctccccacagggcagt

SEQ ID NO: 6039 - DNA, 26 bp, Homo sapiens
ggcaagaccctccccacagggcagtc

SEQ ID NO: 6040 - DNA, 26 bp, Homo sapiens
gcaagaccctccccacagggcagtca

SEQ ID NO: 6041 - DNA, 26 bp, Homo sapiens
caagaccctccccacagggcagtcag

SEQ ID NO: 6042 - DNA, 26 bp, Homo sapiens
aagaccctccccacagggcagtcaga

SEQ ID NO: 6043 - DNA, 26 bp, Homo sapiens
agaccctccccacagggcagtcagag

SEQ ID NO: 6044 - DNA, 26 bp, Homo sapiens
gaccctccccacagggcagtcagaga

SEQ ID NO: 6045 - DNA, 26 bp, Homo sapiens
accctccccacagggcagtcagagac

SEQ ID NO: 6046 - DNA, 26 bp, Homo sapiens
ccctccccacagggcagtcagagacc

SEQ ID NO: 6047 - DNA, 26 bp, Homo sapiens
cctccccacagggcagtcagagaccc

SEQ ID NO: 6048 - DNA, 26 bp, Homo sapiens
ctccccacagggcagtcagagacccg

SEQ ID NO: 6049 - DNA, 26 bp, Homo sapiens
tccccacagggcagtcagagacccgc

SEQ ID NO: 6050 - DNA, 26 bp, Homo sapiens
ccccacagggcagtcagagacccgca

SEQ ID NO: 6051 - DNA, 26 bp, Homo sapiens
cccacagggcagtcagagacccgcag

SEQ ID NO: 6052 - DNA, 26 bp, Homo sapiens
ccacagggcagtcagagacccgcagc

SEQ ID NO: 6053 - DNA, 26 bp, Homo sapiens
cacagggcagtcagagacccgcagcc

SEQ ID NO: 6054 - DNA, 26 bp, Homo sapiens
acagggcagtcagagacccgcagccg

SEQ ID NO: 6055 - DNA, 26 bp, Homo sapiens
cagggcagtcagagacccgcagccga

SEQ ID NO: 6056 - DNA, 26 bp, Homo sapiens
agggcagtcagagacccgcagccgac

SEQ ID NO: 6057 - DNA, 26 bp, Homo sapiens
gggcagtcagagacccgcagccgaca

SEQ ID NO: 6058 - DNA, 26 bp, Homo sapiens
ggcagtcagagacccgcagccgacag

SEQ ID NO: 6059 - DNA, 26 bp, Homo sapiens
gcagtcagagacccgcagccgacaga

SEQ ID NO: 6060 - DNA, 26 bp, Homo sapiens
cagtcagagacccgcagccgacagac

SEQ ID NO: 6061 - DNA, 26 bp, Homo sapiens
agtcagagacccgcagccgacagact

SEQ ID NO: 6062 - DNA, 26 bp, Homo sapiens
gtcagagacccgcagccgacagacta

SEQ ID NO: 6063 - DNA, 26 bp, Homo sapiens
tcagagacccgcagccgacagactaa

SEQ ID NO: 6064 - DNA, 26 bp, Homo sapiens
cagagacccgcagccgacagactaag

SEQ ID NO: 6065 - DNA, 26 bp, Homo sapiens
agagacccgcagccgacagactaagc

SEQ ID NO: 6066 - DNA, 26 bp, Homo sapiens
gagacccgcagccgacagactaagcc

SEQ ID NO: 6067 - DNA, 26 bp, Homo sapiens
agacccgcagccgacagactaagcct

SEQ ID NO: 6068 - DNA, 26 bp, Homo sapiens
gacccgcagccgacagactaagcctg

SEQ ID NO: 6069 - DNA, 26 bp, Homo sapiens
acccgcagccgacagactaagcctgc

SEQ ID NO: 6070 - DNA, 26 bp, Homo sapiens
cccgcagccgacagactaagcctgca

SEQ ID NO: 6071 - DNA, 26 bp, Homo sapiens
ccgcagccgacagactaagcctgcag

SEQ ID NO: 6072 - DNA, 26 bp, Homo sapiens
cgcagccgacagactaagcctgcagc

SEQ ID NO: 6073 - DNA, 26 bp, Homo sapiens
gcagccgacagactaagcctgcagct

SEQ ID NO: 6074 - DNA, 26 bp, Homo sapiens
cagccgacagactaagcctgcagctt

SEQ ID NO: 6075 - DNA, 26 bp, Homo sapiens
agccgacagactaagcctgcagcttc

SEQ ID NO: 6076 - DNA, 26 bp, Homo sapiens
gccgacagactaagcctgcagcttcc

SEQ ID NO: 6077 - DNA, 26 bp, Homo sapiens
ccgacagactaagcctgcagcttcca

SEQ ID NO: 6078 - DNA, 26 bp, Homo sapiens
cgacagactaagcctgcagcttccaa

SEQ ID NO: 6079 - DNA, 26 bp, Homo sapiens
gacagactaagcctgcagcttccaac

SEQ ID NO: 6080 - DNA, 26 bp, Homo sapiens
acagactaagcctgcagcttccaacc

SEQ ID NO: 6081 - DNA, 26 bp, Homo sapiens
cagactaagcctgcagcttccaacca

SEQ ID NO: 6082 - DNA, 26 bp, Homo sapiens
agactaagcctgcagcttccaaccag

SEQ ID NO: 6083 - DNA, 26 bp, Homo sapiens
gactaagcctgcagcttccaaccagg

SEQ ID NO: 6084 - DNA, 26 bp, Homo sapiens
actaagcctgcagcttccaaccaggc

SEQ ID NO: 6085 - DNA, 26 bp, Homo sapiens
ctaagcctgcagcttccaaccaggct

SEQ ID NO: 6086 - DNA, 26 bp, Homo sapiens
taagcctgcagcttccaaccaggctc

SEQ ID NO: 6087 - DNA, 26 bp, Homo sapiens
aagcctgcagcttccaaccaggctcc

SEQ ID NO: 6088 - DNA, 26 bp, Homo sapiens
agcctgcagcttccaaccaggctccc

SEQ ID NO: 6089 - DNA, 26 bp, Homo sapiens
gcctgcagcttccaaccaggctcccc

SEQ ID NO: 6090 - DNA, 26 bp, Homo sapiens
cctgcagcttccaaccaggctccccg

SEQ ID NO: 6091 - DNA, 26 bp, Homo sapiens
ctgcagcttccaaccaggctccccga

SEQ ID NO: 6092 - DNA, 26 bp, Homo sapiens
tgcagcttccaaccaggctccccgag

SEQ ID NO: 6093 - DNA, 26 bp, Homo sapiens
gcagcttccaaccaggctccccgaga

SEQ ID NO: 6094 - DNA, 26 bp, Homo sapiens
cagcttccaaccaggctccccgagat

SEQ ID NO: 6095 - DNA, 26 bp, Homo sapiens
agcttccaaccaggctccccgagatg

SEQ ID NO: 6096 - DNA, 26 bp, Homo sapiens
gcttccaaccaggctccccgagatgt

SEQ ID NO: 6097 - DNA, 26 bp, Homo sapiens
cttccaaccaggctccccgagatgtt

SEQ ID NO: 6098 - DNA, 26 bp, Homo sapiens
ttccaaccaggctccccgagatgttc

SEQ ID NO: 6099 - DNA, 26 bp, Homo sapiens
tccaaccaggctccccgagatgttcc

SEQ ID NO: 6100 - DNA, 26 bp, Homo sapiens
ccaaccaggctccccgagatgttccc

SEQ ID NO: 6101 - DNA, 26 bp, Homo sapiens
caaccaggctccccgagatgttccct

SEQ ID NO: 6102 - DNA, 26 bp, Homo sapiens
aaccaggctccccgagatgttccctg

SEQ ID NO: 6103 - DNA, 26 bp, Homo sapiens
accaggctccccgagatgttccctgg

SEQ ID NO: 6104 - DNA, 26 bp, Homo sapiens
ccaggctccccgagatgttccctggt

SEQ ID NO: 6105 - DNA, 26 bp, Homo sapiens
caggctccccgagatgttccctggtg

SEQ ID NO: 6106 - DNA, 26 bp, Homo sapiens
aggctccccgagatgttccctggtgg

SEQ ID NO: 6107 - DNA, 26 bp, Homo sapiens
ggctccccgagatgttccctggtggt

SEQ ID NO: 6108 - DNA, 26 bp, Homo sapiens
gctccccgagatgttccctggtggtg

SEQ ID NO: 6109 - DNA, 26 bp, Homo sapiens
ctccccgagatgttccctggtggtgc

SEQ ID NO: 6110 - DNA, 26 bp, Homo sapiens
tccccgagatgttccctggtggtgct

SEQ ID NO: 6111 - DNA, 26 bp, Homo sapiens
ccccgagatgttccctggtggtgctc

SEQ ID NO: 6112 - DNA, 26 bp, Homo sapiens
cccgagatgttccctggtggtgctcc

SEQ ID NO: 6113 - DNA, 26 bp, Homo sapiens
ccgagatgttccctggtggtgctccc

SEQ ID NO: 6114 - DNA, 26 bp, Homo sapiens
cgagatgttccctggtggtgctccct

SEQ ID NO: 6115 - DNA, 26 bp, Homo sapiens
gagatgttccctggtggtgctccctg

SEQ ID NO: 6116 - DNA, 26 bp, Homo sapiens
agatgttccctggtggtgctccctgt

SEQ ID NO: 6117 - DNA, 26 bp, Homo sapiens
gatgttccctggtggtgctccctgta

SEQ ID NO: 6118 - DNA, 26 bp, Homo sapiens
atgttccctggtggtgctccctgtaa

SEQ ID NO: 6119 - DNA, 26 bp, Homo sapiens
tgttccctggtggtgctccctgtaac

SEQ ID NO: 6120 - DNA, 26 bp, Homo sapiens
gttccctggtggtgctccctgtaact

SEQ ID NO: 6121 - DNA, 26 bp, Homo sapiens
ttttttttttttttttttacacccaa

SEQ ID NO: 6122 - DNA, 26 bp, Homo sapiens
tttttttttttttttttacacccaaa

SEQ ID NO: 6123 - DNA, 26 bp, Homo sapiens
ttttttttttttttttacacccaaaa

SEQ ID NO: 6124 - DNA, 26 bp, Homo sapiens
tttttttttttttttacacccaaaag

SEQ ID NO: 6125 - DNA, 26 bp, Homo sapiens
ttttttttttttttacacccaaaagg

SEQ ID NO: 6126 - DNA, 26 bp, Homo sapiens
tttttttttttttacacccaaaaggc

SEQ ID NO: 6127 - DNA, 26 bp, Homo sapiens
ttttttttttttacacccaaaaggcc

SEQ ID NO: 6128 - DNA, 26 bp, Homo sapiens
tttttttttttacacccaaaaggcca

SEQ ID NO: 6129 - DNA, 26 bp, Homo sapiens
ttttttttttacacccaaaaggccaa

SEQ ID NO: 6130 - DNA, 26 bp, Homo sapiens
tttttttttacacccaaaaggccaaa

SEQ ID NO: 6131 - DNA, 26 bp, Homo sapiens
ttttttttacacccaaaaggccaaac

SEQ ID NO: 6132 - DNA, 26 bp, Homo sapiens
tttttttacacccaaaaggccaaaca

SEQ ID NO: 6133 - DNA, 26 bp, Homo sapiens
ttttttacacccaaaaggccaaacaa

SEQ ID NO: 6134 - DNA, 26 bp, Homo sapiens
tttttacacccaaaaggccaaacaat

SEQ ID NO: 6135 - DNA, 26 bp, Homo sapiens
ttttacacccaaaaggccaaacaatt

SEQ ID NO: 6136 - DNA, 26 bp, Homo sapiens
tttacacccaaaaggccaaacaattt

SEQ ID NO: 6137 - DNA, 26 bp, Homo sapiens
ttacacccaaaaggccaaacaatttt

SEQ ID NO: 6138 - DNA, 26 bp, Homo sapiens
tacacccaaaaggccaaacaattttt

SEQ ID NO: 6139 - DNA, 26 bp, Homo sapiens
acacccaaaaggccaaacaattttta

SEQ ID NO: 6140 - DNA, 26 bp, Homo sapiens
cacccaaaaggccaaacaatttttat

SEQ ID NO: 6141 - DNA, 26 bp, Homo sapiens
acccaaaaggccaaacaatttttatt

SEQ ID NO: 6142 - DNA, 26 bp, Homo sapiens
cccaaaaggccaaacaatttttattt

SEQ ID NO: 6143 - DNA, 26 bp, Homo sapiens
ccaaaaggccaaacaatttttatttt

SEQ ID NO: 6144 - DNA, 26 bp, Homo sapiens
caaaaggccaaacaatttttattttc

SEQ ID NO: 6145 - DNA, 26 bp, Homo sapiens
aaaaggccaaacaatttttattttca

SEQ ID NO: 6146 - DNA, 26 bp, Homo sapiens
aaaggccaaacaatttttattttcaa

SEQ ID NO: 6147 - DNA, 26 bp, Homo sapiens
aaggccaaacaatttttattttcaaa

SEQ ID NO: 6148 - DNA, 26 bp, Homo sapiens
aggccaaacaatttttattttcaaaa

SEQ ID NO: 6149 - DNA, 26 bp, Homo sapiens
ggccaaacaatttttattttcaaaaa

SEQ ID NO: 6150 - DNA, 26 bp, Homo sapiens
gccaaacaatttttattttcaaaaac

SEQ ID NO: 6151 - DNA, 26 bp, Homo sapiens
ccaaacaatttttattttcaaaaaca

SEQ ID NO: 6152 - DNA, 26 bp, Homo sapiens
caaacaatttttattttcaaaaacaa

SEQ ID NO: 6153 - DNA, 26 bp, Homo sapiens
aaacaatttttattttcaaaaacaac

SEQ ID NO: 6154 - DNA, 26 bp, Homo sapiens
aacaatttttattttcaaaaacaact

SEQ ID NO: 6155 - DNA, 26 bp, Homo sapiens
acaatttttattttcaaaaacaactt

SEQ ID NO: 6156 - DNA, 26 bp, Homo sapiens
caatttttattttcaaaaacaacttt

SEQ ID NO: 6157 - DNA, 26 bp, Homo sapiens
aatttttattttcaaaaacaacttta

SEQ ID NO: 6158 - DNA, 26 bp, Homo sapiens
atttttattttcaaaaacaactttat

SEQ ID NO: 6159 - DNA, 26 bp, Homo sapiens
tttttattttcaaaaacaactttatt

SEQ ID NO: 6160 - DNA, 26 bp, Homo sapiens
ttttattttcaaaaacaactttattc

SEQ ID NO: 6161 - DNA, 26 bp, Homo sapiens
tttattttcaaaaacaactttattca

SEQ ID NO: 6162 - DNA, 26 bp, Homo sapiens
ttattttcaaaaacaactttattcat

SEQ ID NO: 6163 - DNA, 26 bp, Homo sapiens
tattttcaaaaacaactttattcatg

SEQ ID NO: 6164 - DNA, 26 bp, Homo sapiens
attttcaaaaacaactttattcatga

SEQ ID NO: 6165 - DNA, 26 bp, Homo sapiens
ttttcaaaaacaactttattcatgac

SEQ ID NO: 6166 - DNA, 26 bp, Homo sapiens
tttcaaaaacaactttattcatgaca

SEQ ID NO: 6167 - DNA, 26 bp, Homo sapiens
ttcaaaaacaactttattcatgacac

SEQ ID NO: 6168 - DNA, 26 bp, Homo sapiens
tcaaaaacaactttattcatgacaca

SEQ ID NO: 6169 - DNA, 26 bp, Homo sapiens
caaaaacaactttattcatgacacat

SEQ ID NO: 6170 - DNA, 26 bp, Homo sapiens
aaaaacaactttattcatgacacata

SEQ ID NO: 6171 - DNA, 26 bp, Homo sapiens
aaaacaactttattcatgacacatat

SEQ ID NO: 6172 - DNA, 26 bp, Homo sapiens
aaacaactttattcatgacacatatt

SEQ ID NO: 6173 - DNA, 26 bp, Homo sapiens
aacaactttattcatgacacatatta

SEQ ID NO: 6174 - DNA, 26 bp, Homo sapiens
acaactttattcatgacacatattaa

SEQ ID NO: 6175 - DNA, 26 bp, Homo sapiens
caactttattcatgacacatattaaa

SEQ ID NO: 6176 - DNA, 26 bp, Homo sapiens
aactttattcatgacacatattaaaa

SEQ ID NO: 6177 - DNA, 26 bp, Homo sapiens
actttattcatgacacatattaaaaa

SEQ ID NO: 6178 - DNA, 26 bp, Homo sapiens
ctttattcatgacacatattaaaaaa

SEQ ID NO: 6179 - DNA, 26 bp, Homo sapiens
tttattcatgacacatattaaaaaaa

SEQ ID NO: 6180 - DNA, 26 bp, Homo sapiens
ttattcatgacacatattaaaaaaaa

SEQ ID NO: 6181 - DNA, 26 bp, Homo sapiens
tattcatgacacatattaaaaaaaaa

SEQ ID NO: 6182 - DNA, 26 bp, Homo sapiens
attcatgacacatattaaaaaaaaat

SEQ ID NO: 6183 - DNA, 26 bp, Homo sapiens
ttcatgacacatattaaaaaaaaatt

SEQ ID NO: 6184 - DNA, 26 bp, Homo sapiens
tcatgacacatattaaaaaaaaattc

SEQ ID NO: 6185 - DNA, 26 bp, Homo sapiens
catgacacatattaaaaaaaaattcc

SEQ ID NO: 6186 - DNA, 26 bp, Homo sapiens
atgacacatattaaaaaaaaattccc

SEQ ID NO: 6187 - DNA, 26 bp, Homo sapiens
tgacacatattaaaaaaaaattccca

SEQ ID NO: 6188 - DNA, 26 bp, Homo sapiens
gacacatattaaaaaaaaattcccac

SEQ ID NO: 6189 - DNA, 26 bp, Homo sapiens
acacatattaaaaaaaaattcccacc

SEQ ID NO: 6190 - DNA, 26 bp, Homo sapiens
cacatattaaaaaaaaattcccaccc

SEQ ID NO: 6191 - DNA, 26 bp, Homo sapiens
acatattaaaaaaaaattcccacccc

SEQ ID NO: 6192 - DNA, 26 bp, Homo sapiens
catattaaaaaaaaattcccacccct

SEQ ID NO: 6193 - DNA, 26 bp, Homo sapiens
atattaaaaaaaaattcccacccctg

SEQ ID NO: 6194 - DNA, 26 bp, Homo sapiens
tattaaaaaaaaattcccacccctgg

SEQ ID NO: 6195 - DNA, 26 bp, Homo sapiens
attaaaaaaaaattcccacccctgga

SEQ ID NO: 6196 - DNA, 26 bp, Homo sapiens
ttaaaaaaaaattcccacccctggaa

SEQ ID NO: 6197 - DNA, 26 bp, Homo sapiens
taaaaaaaaattcccacccctggaaa

SEQ ID NO: 6198 - DNA, 26 bp, Homo sapiens
aaaaaaaaattcccacccctggaaat

SEQ ID NO: 6199 - DNA, 26 bp, Homo sapiens
aaaaaaaattcccacccctggaaatg

SEQ ID NO: 6200 - DNA, 26 bp, Homo sapiens
aaaaaaattcccacccctggaaatga

SEQ ID NO: 6201 - DNA, 26 bp, Homo sapiens
aaaaaattcccacccctggaaatgag

SEQ ID NO: 6202 - DNA, 26 bp, Homo sapiens
aaaaattcccacccctggaaatgagc

SEQ ID NO: 6203 - DNA, 26 bp, Homo sapiens
aaaattcccacccctggaaatgagct

SEQ ID NO: 6204 - DNA, 26 bp, Homo sapiens
aaattcccacccctggaaatgagcta

SEQ ID NO: 6205 - DNA, 26 bp, Homo sapiens
aattcccacccctggaaatgagctaa

SEQ ID NO: 6206 - DNA, 26 bp, Homo sapiens
attcccacccctggaaatgagctaaa

SEQ ID NO: 6207 - DNA, 26 bp, Homo sapiens
ttcccacccctggaaatgagctaaaa

SEQ ID NO: 6208 - DNA, 26 bp, Homo sapiens
tcccacccctggaaatgagctaaaaa

SEQ ID NO: 6209 - DNA, 26 bp, Homo sapiens
cccacccctggaaatgagctaaaaaa

SEQ ID NO: 6210 - DNA, 26 bp, Homo sapiens
ccacccctggaaatgagctaaaaaaa

SEQ ID NO: 6211 - DNA, 26 bp, Homo sapiens
cacccctggaaatgagctaaaaaaat

SEQ ID NO: 6212 - DNA, 26 bp, Homo sapiens
acccctggaaatgagctaaaaaaata

SEQ ID NO: 6213 - DNA, 26 bp, Homo sapiens
cccctggaaatgagctaaaaaaataa

SEQ ID NO: 6214 - DNA, 26 bp, Homo sapiens
ccctggaaatgagctaaaaaaataaa

SEQ ID NO: 6215 - DNA, 26 bp, Homo sapiens
cctggaaatgagctaaaaaaataaac

SEQ ID NO: 6216 - DNA, 26 bp, Homo sapiens
ctggaaatgagctaaaaaaataaaca

SEQ ID NO: 6217 - DNA, 26 bp, Homo sapiens
tggaaatgagctaaaaaaataaacaa

SEQ ID NO: 6218 - DNA, 26 bp, Homo sapiens
ggaaatgagctaaaaaaataaacaaa

SEQ ID NO: 6219 - DNA, 26 bp, Homo sapiens
gaaatgagctaaaaaaataaacaaaa

SEQ ID NO: 6220 - DNA, 26 bp, Homo sapiens
aaatgagctaaaaaaataaacaaaat

SEQ ID NO: 6221 - DNA, 26 bp, Homo sapiens
aatgagctaaaaaaataaacaaaatc

SEQ ID NO: 6222 - DNA, 26 bp, Homo sapiens
atgagctaaaaaaataaacaaaatcc

SEQ ID NO: 6223 - DNA, 26 bp, Homo sapiens
tgagctaaaaaaataaacaaaatcca

SEQ ID NO: 6224 - DNA, 26 bp, Homo sapiens
gagctaaaaaaataaacaaaatccac

SEQ ID NO: 6225 - DNA, 26 bp, Homo sapiens
agctaaaaaaataaacaaaatccacc

SEQ ID NO: 6226 - DNA, 26 bp, Homo sapiens
gctaaaaaaataaacaaaatccacct

SEQ ID NO: 6227 - DNA, 26 bp, Homo sapiens
ctaaaaaaataaacaaaatccacctc

SEQ ID NO: 6228 - DNA, 26 bp, Homo sapiens
taaaaaaataaacaaaatccacctcc

SEQ ID NO: 6229 - DNA, 26 bp, Homo sapiens
aaaaaaataaacaaaatccacctccc

SEQ ID NO: 6230 - DNA, 26 bp, Homo sapiens
aaaaaataaacaaaatccacctccca

SEQ ID NO: 6231 - DNA, 26 bp, Homo sapiens
aaaaataaacaaaatccacctcccac

SEQ ID NO: 6232 - DNA, 26 bp, Homo sapiens
aaaataaacaaaatccacctcccacc

SEQ ID NO: 6233 - DNA, 26 bp, Homo sapiens
aaataaacaaaatccacctcccacct

SEQ ID NO: 6234 - DNA, 26 bp, Homo sapiens
aataaacaaaatccacctcccacctc

SEQ ID NO: 6235 - DNA, 26 bp, Homo sapiens
ataaacaaaatccacctcccacctcc

SEQ ID NO: 6236 - DNA, 26 bp, Homo sapiens
taaacaaaatccacctcccacctccc

SEQ ID NO: 6237 - DNA, 26 bp, Homo sapiens
aaacaaaatccacctcccacctccct

SEQ ID NO: 6238 - DNA, 26 bp, Homo sapiens
aacaaaatccacctcccacctccctg

SEQ ID NO: 6239 - DNA, 26 bp, Homo sapiens
acaaaatccacctcccacctccctgt

SEQ ID NO: 6240 - DNA, 26 bp, Homo sapiens
caaaatccacctcccacctccctgtt

SEQ ID NO: 6241 - DNA, 26 bp, Homo sapiens
aaaatccacctcccacctccctgttc

SEQ ID NO: 6242 - DNA, 26 bp, Homo sapiens
aaatccacctcccacctccctgttcc

SEQ ID NO: 6243 - DNA, 26 bp, Homo sapiens
aatccacctcccacctccctgttccc

SEQ ID NO: 6244 - DNA, 26 bp, Homo sapiens
atccacctcccacctccctgttccca

SEQ ID NO: 6245 - DNA, 26 bp, Homo sapiens
tccacctcccacctccctgttcccac

SEQ ID NO: 6246 - DNA, 26 bp, Homo sapiens
ccacctcccacctccctgttcccact

SEQ ID NO: 6247 - DNA, 26 bp, Homo sapiens
cacctcccacctccctgttcccactt

SEQ ID NO: 6248 - DNA, 26 bp, Homo sapiens
acctcccacctccctgttcccacttc

SEQ ID NO: 6249 - DNA, 26 bp, Homo sapiens
cctcccacctccctgttcccacttcc

SEQ ID NO: 6250 - DNA, 26 bp, Homo sapiens
ctcccacctccctgttcccacttcct

SEQ ID NO: 6251 - DNA, 26 bp, Homo sapiens
tcccacctccctgttcccacttcctc

SEQ ID NO: 6252 - DNA, 26 bp, Homo sapiens
cccacctccctgttcccacttcctcc

SEQ ID NO: 6253 - DNA, 26 bp, Homo sapiens
ccacctccctgttcccacttcctccc

SEQ ID NO: 6254 - DNA, 26 bp, Homo sapiens
cacctccctgttcccacttcctccca

SEQ ID NO: 6255 - DNA, 26 bp, Homo sapiens
acctccctgttcccacttcctcccat

SEQ ID NO: 6256 - DNA, 26 bp, Homo sapiens
cctccctgttcccacttcctcccatt

SEQ ID NO: 6257 - DNA, 26 bp, Homo sapiens
ctccctgttcccacttcctcccattc

SEQ ID NO: 6258 - DNA, 26 bp, Homo sapiens
tccctgttcccacttcctcccattcc

SEQ ID NO: 6259 - DNA, 26 bp, Homo sapiens
ccctgttcccacttcctcccattccc

SEQ ID NO: 6260 - DNA, 26 bp, Homo sapiens
cctgttcccacttcctcccattccct

SEQ ID NO: 6261 - DNA, 26 bp, Homo sapiens
ctgttcccacttcctcccattccctc

SEQ ID NO: 6262 - DNA, 26 bp, Homo sapiens
tgttcccacttcctcccattccctcc

SEQ ID NO: 6263 - DNA, 26 bp, Homo sapiens
gttcccacttcctcccattccctcca

SEQ ID NO: 6264 - DNA, 26 bp, Homo sapiens
ttcccacttcctcccattccctccaa

SEQ ID NO: 6265 - DNA, 26 bp, Homo sapiens
tcccacttcctcccattccctccaaa

SEQ ID NO: 6266 - DNA, 26 bp, Homo sapiens
cccacttcctcccattccctccaaat

SEQ ID NO: 6267 - DNA, 26 bp, Homo sapiens
ccacttcctcccattccctccaaata

SEQ ID NO: 6268 - DNA, 26 bp, Homo sapiens
cacttcctcccattccctccaaataa

SEQ ID NO: 6269 - DNA, 26 bp, Homo sapiens
acttcctcccattccctccaaataaa

SEQ ID NO: 6270 - DNA, 26 bp, Homo sapiens
cttcctcccattccctccaaataaaa

SEQ ID NO: 6271 - DNA, 26 bp, Homo sapiens
ttcctcccattccctccaaataaaag

SEQ ID NO: 6272 - DNA, 26 bp, Homo sapiens
tcctcccattccctccaaataaaagg

SEQ ID NO: 6273 - DNA, 26 bp, Homo sapiens
cctcccattccctccaaataaaaggg

SEQ ID NO: 6274 - DNA, 26 bp, Homo sapiens
ctcccattccctccaaataaaaggga

SEQ ID NO: 6275 - DNA, 26 bp, Homo sapiens
tcccattccctccaaataaaagggaa

SEQ ID NO: 6276 - DNA, 26 bp, Homo sapiens
cccattccctccaaataaaagggaaa

SEQ ID NO: 6277 - DNA, 26 bp, Homo sapiens
ccattccctccaaataaaagggaaaa

SEQ ID NO: 6278 - DNA, 26 bp, Homo sapiens
cattccctccaaataaaagggaaaaa

SEQ ID NO: 6279 - DNA, 26 bp, Homo sapiens
attccctccaaataaaagggaaaaaa

SEQ ID NO: 6280 - DNA, 26 bp, Homo sapiens
ttccctccaaataaaagggaaaaaag

SEQ ID NO: 6281 - DNA, 26 bp, Homo sapiens
tccctccaaataaaagggaaaaaagg

SEQ ID NO: 6282 - DNA, 26 bp, Homo sapiens
ccctccaaataaaagggaaaaaaggc

SEQ ID NO: 6283 - DNA, 26 bp, Homo sapiens
cctccaaataaaagggaaaaaaggca

SEQ ID NO: 6284 - DNA, 26 bp, Homo sapiens
ctccaaataaaagggaaaaaaggcaa

SEQ ID NO: 6285 - DNA, 26 bp, Homo sapiens
tccaaataaaagggaaaaaaggcaaa

SEQ ID NO: 6286 - DNA, 26 bp, Homo sapiens
ccaaataaaagggaaaaaaggcaaag

SEQ ID NO: 6287 - DNA, 26 bp, Homo sapiens
caaataaaagggaaaaaaggcaaagg

SEQ ID NO: 6288 - DNA, 26 bp, Homo sapiens
aaataaaagggaaaaaaggcaaagga

SEQ ID NO: 6289 - DNA, 26 bp, Homo sapiens
aataaaagggaaaaaaggcaaaggaa

SEQ ID NO: 6290 - DNA, 26 bp, Homo sapiens
ataaaagggaaaaaaggcaaaggaaa

SEQ ID NO: 6291 - DNA, 26 bp, Homo sapiens
taaaagggaaaaaaggcaaaggaaaa

SEQ ID NO: 6292 - DNA, 26 bp, Homo sapiens
aaaagggaaaaaaggcaaaggaaaaa

SEQ ID NO: 6293 - DNA, 26 bp, Homo sapiens
aaagggaaaaaaggcaaaggaaaaaa

SEQ ID NO: 6294 - DNA, 26 bp, Homo sapiens
aagggaaaaaaggcaaaggaaaaaaa

SEQ ID NO: 6295 - DNA, 26 bp, Homo sapiens
agggaaaaaaggcaaaggaaaaaaaa

SEQ ID NO: 6296 - DNA, 26 bp, Homo sapiens
gggaaaaaaggcaaaggaaaaaaaaa

SEQ ID NO: 6297 - DNA, 26 bp, Homo sapiens
ggaaaaaaggcaaaggaaaaaaaaaa

SEQ ID NO: 6298 - DNA, 26 bp, Homo sapiens
gaaaaaaggcaaaggaaaaaaaaaaa

SEQ ID NO: 6299 - DNA, 26 bp, Homo sapiens
aaaaaaggcaaaggaaaaaaaaaaaa

SEQ ID NO: 6300 - DNA, 26 bp, Homo sapiens
aaaaaggcaaaggaaaaaaaaaaaaa

SEQ ID NO: 6301 - DNA, 26 bp, Homo sapiens
aaaaggcaaaggaaaaaaaaaaaaaa

SEQ ID NO: 6302 - DNA, 26 bp, Homo sapiens
aaaggcaaaggaaaaaaaaaaaaaac

SEQ ID NO: 6303 - DNA, 26 bp, Homo sapiens
aaggcaaaggaaaaaaaaaaaaaaca

SEQ ID NO: 6304 - DNA, 26 bp, Homo sapiens
aggcaaaggaaaaaaaaaaaaaacaa

SEQ ID NO: 6305 - DNA, 26 bp, Homo sapiens
ggcaaaggaaaaaaaaaaaaaacaaa

SEQ ID NO: 6306 - DNA, 26 bp, Homo sapiens
gcaaaggaaaaaaaaaaaaaacaaaa

SEQ ID NO: 6307 - DNA, 26 bp, Homo sapiens
caaaggaaaaaaaaaaaaaacaaaaa

SEQ ID NO: 6308 - DNA, 26 bp, Homo sapiens
aaaggaaaaaaaaaaaaaacaaaaaa

SEQ ID NO: 6309 - DNA, 26 bp, Homo sapiens
aaggaaaaaaaaaaaaaacaaaaaaa

SEQ ID NO: 6310 - DNA, 26 bp, Homo sapiens
aggaaaaaaaaaaaaaacaaaaaaac

SEQ ID NO: 6311 - DNA, 26 bp, Homo sapiens
ggaaaaaaaaaaaaaacaaaaaaaca

SEQ ID NO: 6312 - DNA, 26 bp, Homo sapiens
gaaaaaaaaaaaaaacaaaaaaacaa

SEQ ID NO: 6313 - DNA, 26 bp, Homo sapiens
aaaaaaaaaaaaaacaaaaaaacaaa

SEQ ID NO: 6314 - DNA, 26 bp, Homo sapiens
aaaaaaaaaaaaacaaaaaaacaaaa

SEQ ID NO: 6315 - DNA, 26 bp, Homo sapiens
aaaaaaaaaaaacaaaaaaacaaaac

SEQ ID NO: 6316 - DNA, 26 bp, Homo sapiens
aaaaaaaaaaacaaaaaaacaaaaca

SEQ ID NO: 6317 - DNA, 26 bp, Homo sapiens
aaaaaaaaaacaaaaaaacaaaacaa

SEQ ID NO: 6318 - DNA, 26 bp, Homo sapiens
aaaaaaaaacaaaaaaacaaaacaac

SEQ ID NO: 6319 - DNA, 26 bp, Homo sapiens
aaaaaaaacaaaaaaacaaaacaact

SEQ ID NO: 6320 - DNA, 26 bp, Homo sapiens
aaaaaaacaaaaaaacaaaacaactg

SEQ ID NO: 6321 - DNA, 26 bp, Homo sapiens
aaaaaacaaaaaaacaaaacaactga

SEQ ID NO: 6322 - DNA, 26 bp, Homo sapiens
aaaaacaaaaaaacaaaacaactgaa

SEQ ID NO: 6323 - DNA, 26 bp, Homo sapiens
aaaacaaaaaaacaaaacaactgaaa

SEQ ID NO: 6324 - DNA, 26 bp, Homo sapiens
aaacaaaaaaacaaaacaactgaaaa

SEQ ID NO: 6325 - DNA, 26 bp, Homo sapiens
aacaaaaaaacaaaacaactgaaaaa

SEQ ID NO: 6326 - DNA, 26 bp, Homo sapiens
acaaaaaaacaaaacaactgaaaaac

SEQ ID NO: 6327 - DNA, 26 bp, Homo sapiens
caaaaaaacaaaacaactgaaaaaca

SEQ ID NO: 6328 - DNA, 26 bp, Homo sapiens
aaaaaaacaaaacaactgaaaaacaa

SEQ ID NO: 6329 - DNA, 26 bp, Homo sapiens
aaaaaacaaaacaactgaaaaacaaa

SEQ ID NO: 6330 - DNA, 26 bp, Homo sapiens
aaaaacaaaacaactgaaaaacaaaa

SEQ ID NO: 6331 - DNA, 26 bp, Homo sapiens
aaaacaaaacaactgaaaaacaaaaa

SEQ ID NO: 6332 - DNA, 26 bp, Homo sapiens
aaacaaaacaactgaaaaacaaaaac

SEQ ID NO: 6333 - DNA, 26 bp, Homo sapiens
aacaaaacaactgaaaaacaaaaaca

SEQ ID NO: 6334 - DNA, 26 bp, Homo sapiens
acaaaacaactgaaaaacaaaaacac

SEQ ID NO: 6335 - DNA, 26 bp, Homo sapiens
caaaacaactgaaaaacaaaaacacc

SEQ ID NO: 6336 - DNA, 26 bp, Homo sapiens
aaaacaactgaaaaacaaaaacaccc

SEQ ID NO: 6337 - DNA, 26 bp, Homo sapiens
aaacaactgaaaaacaaaaacacccc

SEQ ID NO: 6338 - DNA, 26 bp, Homo sapiens
aacaactgaaaaacaaaaacacccct

SEQ ID NO: 6339 - DNA, 26 bp, Homo sapiens
acaactgaaaaacaaaaacaccccta

SEQ ID NO: 6340 - DNA, 26 bp, Homo sapiens
caactgaaaaacaaaaacacccctaa

SEQ ID NO: 6341 - DNA, 26 bp, Homo sapiens
aactgaaaaacaaaaacacccctaaa

SEQ ID NO: 6342 - DNA, 26 bp, Homo sapiens
actgaaaaacaaaaacacccctaaac

SEQ ID NO: 6343 - DNA, 26 bp, Homo sapiens
ctgaaaaacaaaaacacccctaaacc

SEQ ID NO: 6344 - DNA, 26 bp, Homo sapiens
tgaaaaacaaaaacacccctaaaccc

SEQ ID NO: 6345 - DNA, 26 bp, Homo sapiens
gaaaaacaaaaacacccctaaacccc

SEQ ID NO: 6346 - DNA, 26 bp, Homo sapiens
aaaaacaaaaacacccctaaaccccc

SEQ ID NO: 6347 - DNA, 26 bp, Homo sapiens
aaaacaaaaacacccctaaacccccc

SEQ ID NO: 6348 - DNA, 26 bp, Homo sapiens
aaacaaaaacacccctaaacccccca

SEQ ID NO: 6349 - DNA, 26 bp, Homo sapiens
aacaaaaacacccctaaaccccccaa

SEQ ID NO: 6350 - DNA, 26 bp, Homo sapiens
acaaaaacacccctaaaccccccaaa

SEQ ID NO: 6351 - DNA, 26 bp, Homo sapiens
caaaaacacccctaaaccccccaaaa

SEQ ID NO: 6352 - DNA, 26 bp, Homo sapiens
aaaaacacccctaaaccccccaaaac

SEQ ID NO: 6353 - DNA, 26 bp, Homo sapiens
aaaacacccctaaaccccccaaaaca

SEQ ID NO: 6354 - DNA, 26 bp, Homo sapiens
aaacacccctaaaccccccaaaacaa

SEQ ID NO: 6355 - DNA, 26 bp, Homo sapiens
aacacccctaaaccccccaaaacaag

SEQ ID NO: 6356 - DNA, 26 bp, Homo sapiens
acacccctaaaccccccaaaacaagg

SEQ ID NO: 6357 - DNA, 26 bp, Homo sapiens
cacccctaaaccccccaaaacaaggt

SEQ ID NO: 6358 - DNA, 26 bp, Homo sapiens
acccctaaaccccccaaaacaaggta

SEQ ID NO: 6359 - DNA, 26 bp, Homo sapiens
cccctaaaccccccaaaacaaggtag

SEQ ID NO: 6360 - DNA, 26 bp, Homo sapiens
ccctaaaccccccaaaacaaggtagt

SEQ ID NO: 6361 - DNA, 26 bp, Homo sapiens
cctaaaccccccaaaacaaggtagtg

SEQ ID NO: 6362 - DNA, 26 bp, Homo sapiens
ctaaaccccccaaaacaaggtagtgc

SEQ ID NO: 6363 - DNA, 26 bp, Homo sapiens
taaaccccccaaaacaaggtagtgca

SEQ ID NO: 6364 - DNA, 26 bp, Homo sapiens
aaaccccccaaaacaaggtagtgcat

SEQ ID NO: 6365 - DNA, 26 bp, Homo sapiens
aaccccccaaaacaaggtagtgcatt

SEQ ID NO: 6366 - DNA, 26 bp, Homo sapiens
accccccaaaacaaggtagtgcattt

SEQ ID NO: 6367 - DNA, 26 bp, Homo sapiens
ccccccaaaacaaggtagtgcatttc

SEQ ID NO: 6368 - DNA, 26 bp, Homo sapiens
cccccaaaacaaggtagtgcatttcc

SEQ ID NO: 6369 - DNA, 26 bp, Homo sapiens
ccccaaaacaaggtagtgcatttccc

SEQ ID NO: 6370 - DNA, 26 bp, Homo sapiens
cccaaaacaaggtagtgcatttcccc

SEQ ID NO: 6371 - DNA, 26 bp, Homo sapiens
ccaaaacaaggtagtgcatttcccca

SEQ ID NO: 6372 - DNA, 26 bp, Homo sapiens
caaaacaaggtagtgcatttccccag

SEQ ID NO: 6373 - DNA, 26 bp, Homo sapiens
aaaacaaggtagtgcatttccccagg

SEQ ID NO: 6374 - DNA, 26 bp, Homo sapiens
aaacaaggtagtgcatttccccaggg

SEQ ID NO: 6375 - DNA, 26 bp, Homo sapiens
aacaaggtagtgcatttccccagggg

SEQ ID NO: 6376 - DNA, 26 bp, Homo sapiens
acaaggtagtgcatttccccaggggg

SEQ ID NO: 6377 - DNA, 26 bp, Homo sapiens
caaggtagtgcatttccccaggggga

SEQ ID NO: 6378 - DNA, 26 bp, Homo sapiens
aaggtagtgcatttccccagggggaa

SEQ ID NO: 6379 - DNA, 26 bp, Homo sapiens
aggtagtgcatttccccagggggaag

SEQ ID NO: 6380 - DNA, 26 bp, Homo sapiens
ggtagtgcatttccccagggggaagg

SEQ ID NO: 6381 - DNA, 26 bp, Homo sapiens
gtagtgcatttccccagggggaaggg

SEQ ID NO: 6382 - DNA, 26 bp, Homo sapiens
tagtgcatttccccagggggaagggg

SEQ ID NO: 6383 - DNA, 26 bp, Homo sapiens
agtgcatttccccagggggaagggga

SEQ ID NO: 6384 - DNA, 26 bp, Homo sapiens
gtgcatttccccagggggaaggggaa

SEQ ID NO: 6385 - DNA, 26 bp, Homo sapiens
tgcatttccccagggggaaggggaat

SEQ ID NO: 6386 - DNA, 26 bp, Homo sapiens
gcatttccccagggggaaggggaatt

SEQ ID NO: 6387 - DNA, 26 bp, Homo sapiens
catttccccagggggaaggggaattt

SEQ ID NO: 6388 - DNA, 26 bp, Homo sapiens
atttccccagggggaaggggaattta

SEQ ID NO: 6389 - DNA, 26 bp, Homo sapiens
tttccccagggggaaggggaatttac

SEQ ID NO: 6390 - DNA, 26 bp, Homo sapiens
ttccccagggggaaggggaatttaca

SEQ ID NO: 6391 - DNA, 26 bp, Homo sapiens
tccccagggggaaggggaatttacac

SEQ ID NO: 6392 - DNA, 26 bp, Homo sapiens
ccccagggggaaggggaatttacact

SEQ ID NO: 6393 - DNA, 26 bp, Homo sapiens
cccagggggaaggggaatttacactg

SEQ ID NO: 6394 - DNA, 26 bp, Homo sapiens
ccagggggaaggggaatttacactgg

SEQ ID NO: 6395 - DNA, 26 bp, Homo sapiens
cagggggaaggggaatttacactgga

SEQ ID NO: 6396 - DNA, 26 bp, Homo sapiens
agggggaaggggaatttacactggag

SEQ ID NO: 6397 - DNA, 26 bp, Homo sapiens
gggggaaggggaatttacactggagc

SEQ ID NO: 6398 - DNA, 26 bp, Homo sapiens
ggggaaggggaatttacactggagcc

SEQ ID NO: 6399 - DNA, 26 bp, Homo sapiens
gggaaggggaatttacactggagccg

SEQ ID NO: 6400 - DNA, 26 bp, Homo sapiens
ggaaggggaatttacactggagccgc

SEQ ID NO: 6401 - DNA, 26 bp, Homo sapiens
gaaggggaatttacactggagccgct

SEQ ID NO: 6402 - DNA, 26 bp, Homo sapiens
aaggggaatttacactggagccgctg

SEQ ID NO: 6403 - DNA, 26 bp, Homo sapiens
aggggaatttacactggagccgctgg

SEQ ID NO: 6404 - DNA, 26 bp, Homo sapiens
ggggaatttacactggagccgctggg

SEQ ID NO: 6405 - DNA, 26 bp, Homo sapiens
gggaatttacactggagccgctggga

SEQ ID NO: 6406 - DNA, 26 bp, Homo sapiens
ggaatttacactggagccgctgggag

SEQ ID NO: 6407 - DNA, 26 bp, Homo sapiens
gaatttacactggagccgctgggagc

SEQ ID NO: 6408 - DNA, 26 bp, Homo sapiens
aatttacactggagccgctgggagcg

SEQ ID NO: 6409 - DNA, 26 bp, Homo sapiens
atttacactggagccgctgggagcgg

SEQ ID NO: 6410 - DNA, 26 bp, Homo sapiens
tttacactggagccgctgggagcgga

SEQ ID NO: 6411 - DNA, 26 bp, Homo sapiens
ttacactggagccgctgggagcggaa

SEQ ID NO: 6412 - DNA, 26 bp, Homo sapiens
tacactggagccgctgggagcggaac

SEQ ID NO: 6413 - DNA, 26 bp, Homo sapiens
acactggagccgctgggagcggaacg

SEQ ID NO: 6414 - DNA, 26 bp, Homo sapiens
cactggagccgctgggagcggaacgg

SEQ ID NO: 6415 - DNA, 26 bp, Homo sapiens
actggagccgctgggagcggaacgga

SEQ ID NO: 6416 - DNA, 26 bp, Homo sapiens
ctggagccgctgggagcggaacggag

SEQ ID NO: 6417 - DNA, 26 bp, Homo sapiens
tggagccgctgggagcggaacggaga

SEQ ID NO: 6418 - DNA, 26 bp, Homo sapiens
ggagccgctgggagcggaacggagat

SEQ ID NO: 6419 - DNA, 26 bp, Homo sapiens
gagccgctgggagcggaacggagatc

SEQ ID NO: 6420 - DNA, 26 bp, Homo sapiens
agccgctgggagcggaacggagatct

SEQ ID NO: 6421 - DNA, 26 bp, Homo sapiens
gccgctgggagcggaacggagatctt

SEQ ID NO: 6422 - DNA, 26 bp, Homo sapiens
ccgctgggagcggaacggagatcttc

SEQ ID NO: 6423 - DNA, 26 bp, Homo sapiens
cgctgggagcggaacggagatcttcc

SEQ ID NO: 6424 - DNA, 26 bp, Homo sapiens
gctgggagcggaacggagatcttccg

SEQ ID NO: 6425 - DNA, 26 bp, Homo sapiens
ctgggagcggaacggagatcttccgg

SEQ ID NO: 6426 - DNA, 26 bp, Homo sapiens
tgggagcggaacggagatcttccggc

SEQ ID NO: 6427 - DNA, 26 bp, Homo sapiens
gggagcggaacggagatcttccggct

SEQ ID NO: 6428 - DNA, 26 bp, Homo sapiens
ggagcggaacggagatcttccggcta

SEQ ID NO: 6429 - DNA, 26 bp, Homo sapiens
gagcggaacggagatcttccggctac

SEQ ID NO: 6430 - DNA, 26 bp, Homo sapiens
agcggaacggagatcttccggctaca

SEQ ID NO: 6431 - DNA, 26 bp, Homo sapiens
gcggaacggagatcttccggctacag

SEQ ID NO: 6432 - DNA, 26 bp, Homo sapiens
cggaacggagatcttccggctacaga

SEQ ID NO: 6433 - DNA, 26 bp, Homo sapiens
ggaacggagatcttccggctacagaa

SEQ ID NO: 6434 - DNA, 26 bp, Homo sapiens
gaacggagatcttccggctacagaaa

SEQ ID NO: 6435 - DNA, 26 bp, Homo sapiens
aacggagatcttccggctacagaaac

SEQ ID NO: 6436 - DNA, 26 bp, Homo sapiens
acggagatcttccggctacagaaacc

SEQ ID NO: 6437 - DNA, 26 bp, Homo sapiens
cggagatcttccggctacagaaacct

SEQ ID NO: 6438 - DNA, 26 bp, Homo sapiens
ggagatcttccggctacagaaacctg

SEQ ID NO: 6439 - DNA, 26 bp, Homo sapiens
gagatcttccggctacagaaacctgc

SEQ ID NO: 6440 - DNA, 26 bp, Homo sapiens
agatcttccggctacagaaacctgca

SEQ ID NO: 6441 - DNA, 26 bp, Homo sapiens
gatcttccggctacagaaacctgcaa

SEQ ID NO: 6442 - DNA, 26 bp, Homo sapiens
atcttccggctacagaaacctgcaaa

SEQ ID NO: 6443 - DNA, 26 bp, Homo sapiens
tcttccggctacagaaacctgcaaag

SEQ ID NO: 6444 - DNA, 26 bp, Homo sapiens
cttccggctacagaaacctgcaaaga

SEQ ID NO: 6445 - DNA, 26 bp, Homo sapiens
ttccggctacagaaacctgcaaagaa

SEQ ID NO: 6446 - DNA, 26 bp, Homo sapiens
tccggctacagaaacctgcaaagaaa

SEQ ID NO: 6447 - DNA, 26 bp, Homo sapiens
ccggctacagaaacctgcaaagaaag

SEQ ID NO: 6448 - DNA, 26 bp, Homo sapiens
cggctacagaaacctgcaaagaaaga

SEQ ID NO: 6449 - DNA, 26 bp, Homo sapiens
ggctacagaaacctgcaaagaaagac

SEQ ID NO: 6450 - DNA, 26 bp, Homo sapiens
gctacagaaacctgcaaagaaagaca

SEQ ID NO: 6451 - DNA, 26 bp, Homo sapiens
ctacagaaacctgcaaagaaagacac

SEQ ID NO: 6452 - DNA, 26 bp, Homo sapiens
tacagaaacctgcaaagaaagacact

SEQ ID NO: 6453 - DNA, 26 bp, Homo sapiens
acagaaacctgcaaagaaagacactc

SEQ ID NO: 6454 - DNA, 26 bp, Homo sapiens
cagaaacctgcaaagaaagacactca

SEQ ID NO: 6455 - DNA, 26 bp, Homo sapiens
agaaacctgcaaagaaagacactcaa

SEQ ID NO: 6456 - DNA, 26 bp, Homo sapiens
gaaacctgcaaagaaagacactcaaa

SEQ ID NO: 6457 - DNA, 26 bp, Homo sapiens
aaacctgcaaagaaagacactcaaaa

SEQ ID NO: 6458 - DNA, 26 bp, Homo sapiens
aacctgcaaagaaagacactcaaaac

SEQ ID NO: 6459 - DNA, 26 bp, Homo sapiens
acctgcaaagaaagacactcaaaaca

SEQ ID NO: 6460 - DNA, 26 bp, Homo sapiens
cctgcaaagaaagacactcaaaacag

SEQ ID NO: 6461 - DNA, 26 bp, Homo sapiens
ctgcaaagaaagacactcaaaacaga

SEQ ID NO: 6462 - DNA, 26 bp, Homo sapiens
tgcaaagaaagacactcaaaacagaa

SEQ ID NO: 6463 - DNA, 26 bp, Homo sapiens
gcaaagaaagacactcaaaacagaaa

SEQ ID NO: 6464 - DNA, 26 bp, Homo sapiens
caaagaaagacactcaaaacagaaaa

SEQ ID NO: 6465 - DNA, 26 bp, Homo sapiens
aaagaaagacactcaaaacagaaaaa

SEQ ID NO: 6466 - DNA, 26 bp, Homo sapiens
aagaaagacactcaaaacagaaaaag

SEQ ID NO: 6467 - DNA, 26 bp, Homo sapiens
agaaagacactcaaaacagaaaaaga

SEQ ID NO: 6468 - DNA, 26 bp, Homo sapiens
gaaagacactcaaaacagaaaaagaa

SEQ ID NO: 6469 - DNA, 26 bp, Homo sapiens
aaagacactcaaaacagaaaaagaaa

SEQ ID NO: 6470 - DNA, 26 bp, Homo sapiens
aagacactcaaaacagaaaaagaaac

SEQ ID NO: 6471 - DNA, 26 bp, Homo sapiens
agacactcaaaacagaaaaagaaaca

SEQ ID NO: 6472 - DNA, 26 bp, Homo sapiens
gacactcaaaacagaaaaagaaacac

SEQ ID NO: 6473 - DNA, 26 bp, Homo sapiens
acactcaaaacagaaaaagaaacaca

SEQ ID NO: 6474 - DNA, 26 bp, Homo sapiens
cactcaaaacagaaaaagaaacacaa

SEQ ID NO: 6475 - DNA, 26 bp, Homo sapiens
actcaaaacagaaaaagaaacacaaa

SEQ ID NO: 6476 - DNA, 26 bp, Homo sapiens
ctcaaaacagaaaaagaaacacaaaa

SEQ ID NO: 6477 - DNA, 26 bp, Homo sapiens
tcaaaacagaaaaagaaacacaaaag

SEQ ID NO: 6478 - DNA, 26 bp, Homo sapiens
caaaacagaaaaagaaacacaaaagg

SEQ ID NO: 6479 - DNA, 26 bp, Homo sapiens
aaaacagaaaaagaaacacaaaagga

SEQ ID NO: 6480 - DNA, 26 bp, Homo sapiens
aaacagaaaaagaaacacaaaaggaa

SEQ ID NO: 6481 - DNA, 26 bp, Homo sapiens
aacagaaaaagaaacacaaaaggaaa

SEQ ID NO: 6482 - DNA, 26 bp, Homo sapiens
acagaaaaagaaacacaaaaggaaac

SEQ ID NO: 6483 - DNA, 26 bp, Homo sapiens
cagaaaaagaaacacaaaaggaaaca

SEQ ID NO: 6484 - DNA, 26 bp, Homo sapiens
agaaaaagaaacacaaaaggaaacaa

SEQ ID NO: 6485 - DNA, 26 bp, Homo sapiens
gaaaaagaaacacaaaaggaaacaaa

SEQ ID NO: 6486 - DNA, 26 bp, Homo sapiens
aaaaagaaacacaaaaggaaacaaaa

SEQ ID NO: 6487 - DNA, 26 bp, Homo sapiens
aaaagaaacacaaaaggaaacaaaat

SEQ ID NO: 6488 - DNA, 26 bp, Homo sapiens
aaagaaacacaaaaggaaacaaaata

SEQ ID NO: 6489 - DNA, 26 bp, Homo sapiens
aagaaacacaaaaggaaacaaaatag

SEQ ID NO: 6490 - DNA, 26 bp, Homo sapiens
agaaacacaaaaggaaacaaaataga

SEQ ID NO: 6491 - DNA, 26 bp, Homo sapiens
gaaacacaaaaggaaacaaaatagat

SEQ ID NO: 6492 - DNA, 26 bp, Homo sapiens
aaacacaaaaggaaacaaaatagatc

SEQ ID NO: 6493 - DNA, 26 bp, Homo sapiens
aacacaaaaggaaacaaaatagatca

SEQ ID NO: 6494 - DNA, 26 bp, Homo sapiens
acacaaaaggaaacaaaatagatcac

SEQ ID NO: 6495 - DNA, 26 bp, Homo sapiens
cacaaaaggaaacaaaatagatcacc

SEQ ID NO: 6496 - DNA, 26 bp, Homo sapiens
acaaaaggaaacaaaatagatcacca

SEQ ID NO: 6497 - DNA, 26 bp, Homo sapiens
caaaaggaaacaaaatagatcaccag

SEQ ID NO: 6498 - DNA, 26 bp, Homo sapiens
aaaaggaaacaaaatagatcaccagg

SEQ ID NO: 6499 - DNA, 26 bp, Homo sapiens
aaaggaaacaaaatagatcaccaggc

SEQ ID NO: 6500 - DNA, 26 bp, Homo sapiens
aaggaaacaaaatagatcaccaggca

SEQ ID NO: 6501 - DNA, 26 bp, Homo sapiens
aggaaacaaaatagatcaccaggcaa

SEQ ID NO: 6502 - DNA, 26 bp, Homo sapiens
ggaaacaaaatagatcaccaggcaat

SEQ ID NO: 6503 - DNA, 26 bp, Homo sapiens
gaaacaaaatagatcaccaggcaatc

SEQ ID NO: 6504 - DNA, 26 bp, Homo sapiens
aaacaaaatagatcaccaggcaatct

SEQ ID NO: 6505 - DNA, 26 bp, Homo sapiens
aacaaaatagatcaccaggcaatctg

SEQ ID NO: 6506 - DNA, 26 bp, Homo sapiens
acaaaatagatcaccaggcaatctgg

SEQ ID NO: 6507 - DNA, 26 bp, Homo sapiens
caaaatagatcaccaggcaatctgga

SEQ ID NO: 6508 - DNA, 26 bp, Homo sapiens
aaaatagatcaccaggcaatctggag

SEQ ID NO: 6509 - DNA, 26 bp, Homo sapiens
aaatagatcaccaggcaatctggagg

SEQ ID NO: 6510 - DNA, 26 bp, Homo sapiens
aatagatcaccaggcaatctggaggg

SEQ ID NO: 6511 - DNA, 26 bp, Homo sapiens
atagatcaccaggcaatctggagggg

SEQ ID NO: 6512 - DNA, 26 bp, Homo sapiens
tagatcaccaggcaatctggaggggc

SEQ ID NO: 6513 - DNA, 26 bp, Homo sapiens
agatcaccaggcaatctggaggggca

SEQ ID NO: 6514 - DNA, 26 bp, Homo sapiens
gatcaccaggcaatctggaggggcag

SEQ ID NO: 6515 - DNA, 26 bp, Homo sapiens
atcaccaggcaatctggaggggcagg

SEQ ID NO: 6516 - DNA, 26 bp, Homo sapiens
tcaccaggcaatctggaggggcaggg

SEQ ID NO: 6517 - DNA, 26 bp, Homo sapiens
caccaggcaatctggaggggcaggga

SEQ ID NO: 6518 - DNA, 26 bp, Homo sapiens
accaggcaatctggaggggcagggag

SEQ ID NO: 6519 - DNA, 26 bp, Homo sapiens
ccaggcaatctggaggggcagggagc

SEQ ID NO: 6520 - DNA, 26 bp, Homo sapiens
caggcaatctggaggggcagggagcc

SEQ ID NO: 6521 - DNA, 26 bp, Homo sapiens
aggcaatctggaggggcagggagccg

SEQ ID NO: 6522 - DNA, 26 bp, Homo sapiens
ggcaatctggaggggcagggagccgg

SEQ ID NO: 6523 - DNA, 26 bp, Homo sapiens
gcaatctggaggggcagggagccgga

SEQ ID NO: 6524 - DNA, 26 bp, Homo sapiens
caatctggaggggcagggagccggag

SEQ ID NO: 6525 - DNA, 26 bp, Homo sapiens
aatctggaggggcagggagccggaga

SEQ ID NO: 6526 - DNA, 26 bp, Homo sapiens
atctggaggggcagggagccggagaa

SEQ ID NO: 6527 - DNA, 26 bp, Homo sapiens
tctggaggggcagggagccggagaag

SEQ ID NO: 6528 - DNA, 26 bp, Homo sapiens
ctggaggggcagggagccggagaaga

SEQ ID NO: 6529 - DNA, 26 bp, Homo sapiens
tggaggggcagggagccggagaagag

SEQ ID NO: 6530 - DNA, 26 bp, Homo sapiens
ggaggggcagggagccggagaagagg

SEQ ID NO: 6531 - DNA, 26 bp, Homo sapiens
gaggggcagggagccggagaagaggg

SEQ ID NO: 6532 - DNA, 26 bp, Homo sapiens
aggggcagggagccggagaagagggg

SEQ ID NO: 6533 - DNA, 26 bp, Homo sapiens
ggggcagggagccggagaagaggggt

SEQ ID NO: 6534 - DNA, 26 bp, Homo sapiens
gggcagggagccggagaagaggggtg

SEQ ID NO: 6535 - DNA, 26 bp, Homo sapiens
ggcagggagccggagaagaggggtgg

SEQ ID NO: 6536 - DNA, 26 bp, Homo sapiens
gcagggagccggagaagaggggtggg

SEQ ID NO: 6537 - DNA, 26 bp, Homo sapiens
cagggagccggagaagaggggtgggg

SEQ ID NO: 6538 - DNA, 26 bp, Homo sapiens
agggagccggagaagaggggtggggt

SEQ ID NO: 6539 - DNA, 26 bp, Homo sapiens
gggagccggagaagaggggtggggtg

SEQ ID NO: 6540 - DNA, 26 bp, Homo sapiens
ggagccggagaagaggggtggggtgg

SEQ ID NO: 6541 - DNA, 26 bp, Homo sapiens
gagccggagaagaggggtggggtggg

SEQ ID NO: 6542 - DNA, 26 bp, Homo sapiens
agccggagaagaggggtggggtgggt

SEQ ID NO: 6543 - DNA, 26 bp, Homo sapiens
gccggagaagaggggtggggtgggtg

SEQ ID NO: 6544 - DNA, 26 bp, Homo sapiens
ccggagaagaggggtggggtgggtgg

SEQ ID NO: 6545 - DNA, 26 bp, Homo sapiens
cggagaagaggggtggggtgggtggt

SEQ ID NO: 6546 - DNA, 26 bp, Homo sapiens
ggagaagaggggtggggtgggtggta

SEQ ID NO: 6547 - DNA, 26 bp, Homo sapiens
gagaagaggggtggggtgggtggtag

SEQ ID NO: 6548 - DNA, 26 bp, Homo sapiens
agaagaggggtggggtgggtggtaga

SEQ ID NO: 6549 - DNA, 26 bp, Homo sapiens
gaagaggggtggggtgggtggtagac

SEQ ID NO: 6550 - DNA, 26 bp, Homo sapiens
aagaggggtggggtgggtggtagacc

SEQ ID NO: 6551 - DNA, 26 bp, Homo sapiens
agaggggtggggtgggtggtagacct

SEQ ID NO: 6552 - DNA, 26 bp, Homo sapiens
gaggggtggggtgggtggtagacctg

SEQ ID NO: 6553 - DNA, 26 bp, Homo sapiens
aggggtggggtgggtggtagacctgg

SEQ ID NO: 6554 - DNA, 26 bp, Homo sapiens
ggggtggggtgggtggtagacctggc

SEQ ID NO: 6555 - DNA, 26 bp, Homo sapiens
gggtggggtgggtggtagacctggct

SEQ ID NO: 6556 - DNA, 26 bp, Homo sapiens
ggtggggtgggtggtagacctggctg

SEQ ID NO: 6557 - DNA, 26 bp, Homo sapiens
gtggggtgggtggtagacctggctgg

SEQ ID NO: 6558 - DNA, 26 bp, Homo sapiens
tggggtgggtggtagacctggctgga

SEQ ID NO: 6559 - DNA, 26 bp, Homo sapiens
ggggtgggtggtagacctggctggac

SEQ ID NO: 6560 - DNA, 26 bp, Homo sapiens
gggtgggtggtagacctggctggaca

SEQ ID NO: 6561 - DNA, 26 bp, Homo sapiens
ggtgggtggtagacctggctggacag

SEQ ID NO: 6562 - DNA, 26 bp, Homo sapiens
gtgggtggtagacctggctggacagg

SEQ ID NO: 6563 - DNA, 26 bp, Homo sapiens
tgggtggtagacctggctggacagga

SEQ ID NO: 6564 - DNA, 26 bp, Homo sapiens
gggtggtagacctggctggacaggag

SEQ ID NO: 6565 - DNA, 26 bp, Homo sapiens
ggtggtagacctggctggacaggagc

SEQ ID NO: 6566 - DNA, 26 bp, Homo sapiens
gtggtagacctggctggacaggagca

SEQ ID NO: 6567 - DNA, 26 bp, Homo sapiens
tggtagacctggctggacaggagcag

SEQ ID NO: 6568 - DNA, 26 bp, Homo sapiens
ggtagacctggctggacaggagcagg

SEQ ID NO: 6569 - DNA, 26 bp, Homo sapiens
gtagacctggctggacaggagcaggc

SEQ ID NO: 6570 - DNA, 26 bp, Homo sapiens
tagacctggctggacaggagcaggca

SEQ ID NO: 6571 - DNA, 26 bp, Homo sapiens
agacctggctggacaggagcaggcag

SEQ ID NO: 6572 - DNA, 26 bp, Homo sapiens
gacctggctggacaggagcaggcagg

SEQ ID NO: 6573 - DNA, 26 bp, Homo sapiens
acctggctggacaggagcaggcagga

SEQ ID NO: 6574 - DNA, 26 bp, Homo sapiens
cctggctggacaggagcaggcaggag

SEQ ID NO: 6575 - DNA, 26 bp, Homo sapiens
ctggctggacaggagcaggcaggagg

SEQ ID NO: 6576 - DNA, 26 bp, Homo sapiens
tggctggacaggagcaggcaggaggg

SEQ ID NO: 6577 - DNA, 26 bp, Homo sapiens
ggctggacaggagcaggcaggagggg

SEQ ID NO: 6578 - DNA, 26 bp, Homo sapiens
gctggacaggagcaggcaggagggga

SEQ ID NO: 6579 - DNA, 26 bp, Homo sapiens
ctggacaggagcaggcaggaggggac

SEQ ID NO: 6580 - DNA, 26 bp, Homo sapiens
tggacaggagcaggcaggaggggact

SEQ ID NO: 6581 - DNA, 26 bp, Homo sapiens
ggacaggagcaggcaggaggggactg

SEQ ID NO: 6582 - DNA, 26 bp, Homo sapiens
gacaggagcaggcaggaggggactgt

SEQ ID NO: 6583 - DNA, 26 bp, Homo sapiens
acaggagcaggcaggaggggactgtg

SEQ ID NO: 6584 - DNA, 26 bp, Homo sapiens
caggagcaggcaggaggggactgtga

SEQ ID NO: 6585 - DNA, 26 bp, Homo sapiens
aggagcaggcaggaggggactgtgaa

SEQ ID NO: 6586 - DNA, 26 bp, Homo sapiens
ggagcaggcaggaggggactgtgaaa

SEQ ID NO: 6587 - DNA, 26 bp, Homo sapiens
gagcaggcaggaggggactgtgaaag

SEQ ID NO: 6588 - DNA, 26 bp, Homo sapiens
agcaggcaggaggggactgtgaaagg

SEQ ID NO: 6589 - DNA, 26 bp, Homo sapiens
gcaggcaggaggggactgtgaaaggc

SEQ ID NO: 6590 - DNA, 26 bp, Homo sapiens
caggcaggaggggactgtgaaaggcg

SEQ ID NO: 6591 - DNA, 26 bp, Homo sapiens
aggcaggaggggactgtgaaaggcga

SEQ ID NO: 6592 - DNA, 26 bp, Homo sapiens
ggcaggaggggactgtgaaaggcgag

SEQ ID NO: 6593 - DNA, 26 bp, Homo sapiens
gcaggaggggactgtgaaaggcgagg

SEQ ID NO: 6594 - DNA, 26 bp, Homo sapiens
caggaggggactgtgaaaggcgagga

SEQ ID NO: 6595 - DNA, 26 bp, Homo sapiens
aggaggggactgtgaaaggcgaggag

SEQ ID NO: 6596 - DNA, 26 bp, Homo sapiens
ggaggggactgtgaaaggcgaggaga

SEQ ID NO: 6597 - DNA, 26 bp, Homo sapiens
gaggggactgtgaaaggcgaggagaa

SEQ ID NO: 6598 - DNA, 26 bp, Homo sapiens
aggggactgtgaaaggcgaggagaag

SEQ ID NO: 6599 - DNA, 26 bp, Homo sapiens
ggggactgtgaaaggcgaggagaaga

SEQ ID NO: 6600 - DNA, 26 bp, Homo sapiens
gggactgtgaaaggcgaggagaagac

SEQ ID NO: 6601 - DNA, 26 bp, Homo sapiens
ggactgtgaaaggcgaggagaagacg

SEQ ID NO: 6602 - DNA, 26 bp, Homo sapiens
gactgtgaaaggcgaggagaagacgg

SEQ ID NO: 6603 - DNA, 26 bp, Homo sapiens
actgtgaaaggcgaggagaagacgga

SEQ ID NO: 6604 - DNA, 26 bp, Homo sapiens
ctgtgaaaggcgaggagaagacggag

SEQ ID NO: 6605 - DNA, 26 bp, Homo sapiens
tgtgaaaggcgaggagaagacggagg

SEQ ID NO: 6606 - DNA, 26 bp, Homo sapiens
gtgaaaggcgaggagaagacggaggg

SEQ ID NO: 6607 - DNA, 26 bp, Homo sapiens
tgaaaggcgaggagaagacggaggga

SEQ ID NO: 6608 - DNA, 26 bp, Homo sapiens
gaaaggcgaggagaagacggagggaa

SEQ ID NO: 6609 - DNA, 26 bp, Homo sapiens
aaaggcgaggagaagacggagggaag

SEQ ID NO: 6610 - DNA, 26 bp, Homo sapiens
aaggcgaggagaagacggagggaagg

SEQ ID NO: 6611 - DNA, 26 bp, Homo sapiens
aggcgaggagaagacggagggaaggt

SEQ ID NO: 6612 - DNA, 26 bp, Homo sapiens
ggcgaggagaagacggagggaaggta

SEQ ID NO: 6613 - DNA, 26 bp, Homo sapiens
gcgaggagaagacggagggaaggtaa

SEQ ID NO: 6614 - DNA, 26 bp, Homo sapiens
cgaggagaagacggagggaaggtaac

SEQ ID NO: 6615 - DNA, 26 bp, Homo sapiens
gaggagaagacggagggaaggtaaca

SEQ ID NO: 6616 - DNA, 26 bp, Homo sapiens
aggagaagacggagggaaggtaacaa

SEQ ID NO: 6617 - DNA, 26 bp, Homo sapiens
ggagaagacggagggaaggtaacaag

SEQ ID NO: 6618 - DNA, 26 bp, Homo sapiens
gagaagacggagggaaggtaacaagc

SEQ ID NO: 6619 - DNA, 26 bp, Homo sapiens
agaagacggagggaaggtaacaagca

SEQ ID NO: 6620 - DNA, 26 bp, Homo sapiens
gaagacggagggaaggtaacaagcag

SEQ ID NO: 6621 - DNA, 26 bp, Homo sapiens
aagacggagggaaggtaacaagcaga

SEQ ID NO: 6622 - DNA, 26 bp, Homo sapiens
agacggagggaaggtaacaagcagaa

SEQ ID NO: 6623 - DNA, 26 bp, Homo sapiens
gacggagggaaggtaacaagcagaac

SEQ ID NO: 6624 - DNA, 26 bp, Homo sapiens
acggagggaaggtaacaagcagaaca

SEQ ID NO: 6625 - DNA, 26 bp, Homo sapiens
cggagggaaggtaacaagcagaacag

SEQ ID NO: 6626 - DNA, 26 bp, Homo sapiens
ggagggaaggtaacaagcagaacagt

SEQ ID NO: 6627 - DNA, 26 bp, Homo sapiens
gagggaaggtaacaagcagaacagtt

SEQ ID NO: 6628 - DNA, 26 bp, Homo sapiens
agggaaggtaacaagcagaacagttt

SEQ ID NO: 6629 - DNA, 26 bp, Homo sapiens
gggaaggtaacaagcagaacagtttg

SEQ ID NO: 6630 - DNA, 26 bp, Homo sapiens
ggaaggtaacaagcagaacagtttgg

SEQ ID NO: 6631 - DNA, 26 bp, Homo sapiens
gaaggtaacaagcagaacagtttggt

SEQ ID NO: 6632 - DNA, 26 bp, Homo sapiens
aaggtaacaagcagaacagtttggtg

SEQ ID NO: 6633 - DNA, 26 bp, Homo sapiens
aggtaacaagcagaacagtttggtgt

SEQ ID NO: 6634 - DNA, 26 bp, Homo sapiens
ggtaacaagcagaacagtttggtgtc

SEQ ID NO: 6635 - DNA, 26 bp, Homo sapiens
gtaacaagcagaacagtttggtgtcc

SEQ ID NO: 6636 - DNA, 26 bp, Homo sapiens
taacaagcagaacagtttggtgtcct

SEQ ID NO: 6637 - DNA, 26 bp, Homo sapiens
aacaagcagaacagtttggtgtcctt

SEQ ID NO: 6638 - DNA, 26 bp, Homo sapiens
acaagcagaacagtttggtgtccttc

SEQ ID NO: 6639 - DNA, 26 bp, Homo sapiens
caagcagaacagtttggtgtccttcc

SEQ ID NO: 6640 - DNA, 26 bp, Homo sapiens
aagcagaacagtttggtgtccttcca

SEQ ID NO: 6641 - DNA, 26 bp, Homo sapiens
agcagaacagtttggtgtccttccag

SEQ ID NO: 6642 - DNA, 26 bp, Homo sapiens
gcagaacagtttggtgtccttccaga

SEQ ID NO: 6643 - DNA, 26 bp, Homo sapiens
cagaacagtttggtgtccttccagag

SEQ ID NO: 6644 - DNA, 26 bp, Homo sapiens
agaacagtttggtgtccttccagagc

SEQ ID NO: 6645 - DNA, 26 bp, Homo sapiens
gaacagtttggtgtccttccagagcc

SEQ ID NO: 6646 - DNA, 26 bp, Homo sapiens
aacagtttggtgtccttccagagccc

SEQ ID NO: 6647 - DNA, 26 bp, Homo sapiens
acagtttggtgtccttccagagccct

SEQ ID NO: 6648 - DNA, 26 bp, Homo sapiens
cagtttggtgtccttccagagccctg

SEQ ID NO: 6649 - DNA, 26 bp, Homo sapiens
agtttggtgtccttccagagccctgg

SEQ ID NO: 6650 - DNA, 26 bp, Homo sapiens
gtttggtgtccttccagagccctggg

SEQ ID NO: 6651 - DNA, 26 bp, Homo sapiens
tttggtgtccttccagagccctgggt

SEQ ID NO: 6652 - DNA, 26 bp, Homo sapiens
ttggtgtccttccagagccctgggta

SEQ ID NO: 6653 - DNA, 26 bp, Homo sapiens
tggtgtccttccagagccctgggtaa

SEQ ID NO: 6654 - DNA, 26 bp, Homo sapiens
ggtgtccttccagagccctgggtaaa

SEQ ID NO: 6655 - DNA, 26 bp, Homo sapiens
gtgtccttccagagccctgggtaaaa

SEQ ID NO: 6656 - DNA, 26 bp, Homo sapiens
tgtccttccagagccctgggtaaaaa

SEQ ID NO: 6657 - DNA, 26 bp, Homo sapiens
gtccttccagagccctgggtaaaaaa

SEQ ID NO: 6658 - DNA, 26 bp, Homo sapiens
tccttccagagccctgggtaaaaaaa

SEQ ID NO: 6659 - DNA, 26 bp, Homo sapiens
ccttccagagccctgggtaaaaaaaa

SEQ ID NO: 6660 - DNA, 26 bp, Homo sapiens
cttccagagccctgggtaaaaaaaaa

SEQ ID NO: 6661 - DNA, 26 bp, Homo sapiens
ttccagagccctgggtaaaaaaaaaa

SEQ ID NO: 6662 - DNA, 26 bp, Homo sapiens
tccagagccctgggtaaaaaaaaaaa

SEQ ID NO: 6663 - DNA, 26 bp, Homo sapiens
ccagagccctgggtaaaaaaaaaaac

SEQ ID NO: 6664 - DNA, 26 bp, Homo sapiens
cagagccctgggtaaaaaaaaaaacc

SEQ ID NO: 6665 - DNA, 26 bp, Homo sapiens
agagccctgggtaaaaaaaaaaacct

SEQ ID NO: 6666 - DNA, 26 bp, Homo sapiens
gagccctgggtaaaaaaaaaaacctc

SEQ ID NO: 6667 - DNA, 26 bp, Homo sapiens
agccctgggtaaaaaaaaaaacctcc

SEQ ID NO: 6668 - DNA, 26 bp, Homo sapiens
gccctgggtaaaaaaaaaaacctcct

SEQ ID NO: 6669 - DNA, 26 bp, Homo sapiens
ccctgggtaaaaaaaaaaacctccta

SEQ ID NO: 6670 - DNA, 26 bp, Homo sapiens
cctgggtaaaaaaaaaaacctcctac

SEQ ID NO: 6671 - DNA, 26 bp, Homo sapiens
ctgggtaaaaaaaaaaacctcctacc

SEQ ID NO: 6672 - DNA, 26 bp, Homo sapiens
tgggtaaaaaaaaaaacctcctacca

SEQ ID NO: 6673 - DNA, 26 bp, Homo sapiens
gggtaaaaaaaaaaacctcctaccac

SEQ ID NO: 6674 - DNA, 26 bp, Homo sapiens
ggtaaaaaaaaaaacctcctaccacc

SEQ ID NO: 6675 - DNA, 26 bp, Homo sapiens
gtaaaaaaaaaaacctcctaccaccc

SEQ ID NO: 6676 - DNA, 26 bp, Homo sapiens
taaaaaaaaaaacctcctaccaccca

SEQ ID NO: 6677 - DNA, 26 bp, Homo sapiens
aaaaaaaaaaacctcctaccacccac

SEQ ID NO: 6678 - DNA, 26 bp, Homo sapiens
aaaaaaaaaacctcctaccacccacg

SEQ ID NO: 6679 - DNA, 26 bp, Homo sapiens
aaaaaaaaacctcctaccacccacgc

SEQ ID NO: 6680 - DNA, 26 bp, Homo sapiens
aaaaaaaacctcctaccacccacgcc

SEQ ID NO: 6681 - DNA, 26 bp, Homo sapiens
aaaaaaacctcctaccacccacgccc

SEQ ID NO: 6682 - DNA, 26 bp, Homo sapiens
aaaaaacctcctaccacccacgccca

SEQ ID NO: 6683 - DNA, 26 bp, Homo sapiens
aaaaacctcctaccacccacgcccac

SEQ ID NO: 6684 - DNA, 26 bp, Homo sapiens
aaaacctcctaccacccacgcccacc

SEQ ID NO: 6685 - DNA, 26 bp, Homo sapiens
aaacctcctaccacccacgcccacct

SEQ ID NO: 6686 - DNA, 26 bp, Homo sapiens
aacctcctaccacccacgcccaccta

SEQ ID NO: 6687 - DNA, 26 bp, Homo sapiens
acctcctaccacccacgcccacctac

SEQ ID NO: 6688 - DNA, 26 bp, Homo sapiens
cctcctaccacccacgcccacctacc

SEQ ID NO: 6689 - DNA, 26 bp, Homo sapiens
ctcctaccacccacgcccacctaccc

SEQ ID NO: 6690 - DNA, 26 bp, Homo sapiens
tcctaccacccacgcccacctaccct

SEQ ID NO: 6691 - DNA, 26 bp, Homo sapiens
cctaccacccacgcccacctaccctt

SEQ ID NO: 6692 - DNA, 26 bp, Homo sapiens
ctaccacccacgcccacctacccttg

SEQ ID NO: 6693 - DNA, 26 bp, Homo sapiens
taccacccacgcccacctacccttga

SEQ ID NO: 6694 - DNA, 26 bp, Homo sapiens
accacccacgcccacctacccttgag

SEQ ID NO: 6695 - DNA, 26 bp, Homo sapiens
ccacccacgcccacctacccttgagc

SEQ ID NO: 6696 - DNA, 26 bp, Homo sapiens
cacccacgcccacctacccttgagca

SEQ ID NO: 6697 - DNA, 26 bp, Homo sapiens
acccacgcccacctacccttgagcag

SEQ ID NO: 6698 - DNA, 26 bp, Homo sapiens
cccacgcccacctacccttgagcagc

SEQ ID NO: 6699 - DNA, 26 bp, Homo sapiens
ccacgcccacctacccttgagcagcc

SEQ ID NO: 6700 - DNA, 26 bp, Homo sapiens
cacgcccacctacccttgagcagccc

SEQ ID NO: 6701 - DNA, 26 bp, Homo sapiens
acgcccacctacccttgagcagcccc

SEQ ID NO: 6702 - DNA, 26 bp, Homo sapiens
cgcccacctacccttgagcagccccc

SEQ ID NO: 6703 - DNA, 26 bp, Homo sapiens
gcccacctacccttgagcagccccca

SEQ ID NO: 6704 - DNA, 26 bp, Homo sapiens
cccacctacccttgagcagcccccaa

SEQ ID NO: 6705 - DNA, 26 bp, Homo sapiens
ccacctacccttgagcagcccccaag

SEQ ID NO: 6706 - DNA, 26 bp, Homo sapiens
cacctacccttgagcagcccccaagg

SEQ ID NO: 6707 - DNA, 26 bp, Homo sapiens
acctacccttgagcagcccccaaggg

SEQ ID NO: 6708 - DNA, 26 bp, Homo sapiens
cctacccttgagcagcccccaagggg

SEQ ID NO: 6709 - DNA, 26 bp, Homo sapiens
ctacccttgagcagcccccaaggggg

SEQ ID NO: 6710 - DNA, 26 bp, Homo sapiens
tacccttgagcagcccccaagggggt

SEQ ID NO: 6711 - DNA, 26 bp, Homo sapiens
acccttgagcagcccccaagggggtg

SEQ ID NO: 6712 - DNA, 26 bp, Homo sapiens
cccttgagcagcccccaagggggtga

SEQ ID NO: 6713 - DNA, 26 bp, Homo sapiens
ccttgagcagcccccaagggggtgaa

SEQ ID NO: 6714 - DNA, 26 bp, Homo sapiens
cttgagcagcccccaagggggtgaag

SEQ ID NO: 6715 - DNA, 26 bp, Homo sapiens
ttgagcagcccccaagggggtgaagt

SEQ ID NO: 6716 - DNA, 26 bp, Homo sapiens
tgagcagcccccaagggggtgaagtg

SEQ ID NO: 6717 - DNA, 26 bp, Homo sapiens
gagcagcccccaagggggtgaagtgg

SEQ ID NO: 6718 - DNA, 26 bp, Homo sapiens
agcagcccccaagggggtgaagtggg

SEQ ID NO: 6719 - DNA, 26 bp, Homo sapiens
gcagcccccaagggggtgaagtgggg

SEQ ID NO: 6720 - DNA, 26 bp, Homo sapiens
cagcccccaagggggtgaagtggggc

SEQ ID NO: 6721 - DNA, 26 bp, Homo sapiens
agcccccaagggggtgaagtggggca

SEQ ID NO: 6722 - DNA, 26 bp, Homo sapiens
gcccccaagggggtgaagtggggcag

SEQ ID NO: 6723 - DNA, 26 bp, Homo sapiens
cccccaagggggtgaagtggggcagg

SEQ ID NO: 6724 - DNA, 26 bp, Homo sapiens
ccccaagggggtgaagtggggcaggg

SEQ ID NO: 6725 - DNA, 26 bp, Homo sapiens
cccaagggggtgaagtggggcaggga

SEQ ID NO: 6726 - DNA, 26 bp, Homo sapiens
ccaagggggtgaagtggggcagggaa

SEQ ID NO: 6727 - DNA, 26 bp, Homo sapiens
caagggggtgaagtggggcagggaaa

SEQ ID NO: 6728 - DNA, 26 bp, Homo sapiens
aagggggtgaagtggggcagggaaac

SEQ ID NO: 6729 - DNA, 26 bp, Homo sapiens
agggggtgaagtggggcagggaaaca

SEQ ID NO: 6730 - DNA, 26 bp, Homo sapiens
gggggtgaagtggggcagggaaacat

SEQ ID NO: 6731 - DNA, 26 bp, Homo sapiens
ggggtgaagtggggcagggaaacatg

SEQ ID NO: 6732 - DNA, 26 bp, Homo sapiens
gggtgaagtggggcagggaaacatgg

SEQ ID NO: 6733 - DNA, 26 bp, Homo sapiens
ggtgaagtggggcagggaaacatggg

SEQ ID NO: 6734 - DNA, 26 bp, Homo sapiens
gtgaagtggggcagggaaacatgggc

SEQ ID NO: 6735 - DNA, 26 bp, Homo sapiens
tgaagtggggcagggaaacatgggca

SEQ ID NO: 6736 - DNA, 26 bp, Homo sapiens
gaagtggggcagggaaacatgggcag

SEQ ID NO: 6737 - DNA, 26 bp, Homo sapiens
aagtggggcagggaaacatgggcagc

SEQ ID NO: 6738 - DNA, 26 bp, Homo sapiens
agtggggcagggaaacatgggcagca

SEQ ID NO: 6739 - DNA, 26 bp, Homo sapiens
gtggggcagggaaacatgggcagcag

SEQ ID NO: 6740 - DNA, 26 bp, Homo sapiens
tggggcagggaaacatgggcagcagc

SEQ ID NO: 6741 - DNA, 26 bp, Homo sapiens
ggggcagggaaacatgggcagcagct

SEQ ID NO: 6742 - DNA, 26 bp, Homo sapiens
gggcagggaaacatgggcagcagctt

SEQ ID NO: 6743 - DNA, 26 bp, Homo sapiens
ggcagggaaacatgggcagcagcttg

SEQ ID NO: 6744 - DNA, 26 bp, Homo sapiens
gcagggaaacatgggcagcagcttgc

SEQ ID NO: 6745 - DNA, 26 bp, Homo sapiens
cagggaaacatgggcagcagcttgcg

SEQ ID NO: 6746 - DNA, 26 bp, Homo sapiens
agggaaacatgggcagcagcttgcgc

SEQ ID NO: 6747 - DNA, 26 bp, Homo sapiens
gggaaacatgggcagcagcttgcgca

SEQ ID NO: 6748 - DNA, 26 bp, Homo sapiens
ggaaacatgggcagcagcttgcgcag

SEQ ID NO: 6749 - DNA, 26 bp, Homo sapiens
gaaacatgggcagcagcttgcgcagt

SEQ ID NO: 6750 - DNA, 26 bp, Homo sapiens
aaacatgggcagcagcttgcgcagtt

SEQ ID NO: 6751 - DNA, 26 bp, Homo sapiens
aacatgggcagcagcttgcgcagttg

SEQ ID NO: 6752 - DNA, 26 bp, Homo sapiens
acatgggcagcagcttgcgcagttga

SEQ ID NO: 6753 - DNA, 26 bp, Homo sapiens
catgggcagcagcttgcgcagttgag

SEQ ID NO: 6754 - DNA, 26 bp, Homo sapiens
atgggcagcagcttgcgcagttgaga

SEQ ID NO: 6755 - DNA, 26 bp, Homo sapiens
tgggcagcagcttgcgcagttgagac

SEQ ID NO: 6756 - DNA, 26 bp, Homo sapiens
gggcagcagcttgcgcagttgagacg

SEQ ID NO: 6757 - DNA, 26 bp, Homo sapiens
ggcagcagcttgcgcagttgagacgt

SEQ ID NO: 6758 - DNA, 26 bp, Homo sapiens
gcagcagcttgcgcagttgagacgtg

SEQ ID NO: 6759 - DNA, 26 bp, Homo sapiens
cagcagcttgcgcagttgagacgtgt

SEQ ID NO: 6760 - DNA, 26 bp, Homo sapiens
agcagcttgcgcagttgagacgtgtc

SEQ ID NO: 6761 - DNA, 26 bp, Homo sapiens
gcagcttgcgcagttgagacgtgtcc

SEQ ID NO: 6762 - DNA, 26 bp, Homo sapiens
cagcttgcgcagttgagacgtgtcca

SEQ ID NO: 6763 - DNA, 26 bp, Homo sapiens
agcttgcgcagttgagacgtgtccat

SEQ ID NO: 6764 - DNA, 26 bp, Homo sapiens
gcttgcgcagttgagacgtgtccatg

SEQ ID NO: 6765 - DNA, 26 bp, Homo sapiens
cttgcgcagttgagacgtgtccatgg

SEQ ID NO: 6766 - DNA, 26 bp, Homo sapiens
ttgcgcagttgagacgtgtccatggc

SEQ ID NO: 6767 - DNA, 26 bp, Homo sapiens
tgcgcagttgagacgtgtccatggcg

SEQ ID NO: 6768 - DNA, 26 bp, Homo sapiens
gcgcagttgagacgtgtccatggcga

SEQ ID NO: 6769 - DNA, 26 bp, Homo sapiens
cgcagttgagacgtgtccatggcgaa

SEQ ID NO: 6770 - DNA, 26 bp, Homo sapiens
gcagttgagacgtgtccatggcgaat

SEQ ID NO: 6771 - DNA, 26 bp, Homo sapiens
cagttgagacgtgtccatggcgaatc

SEQ ID NO: 6772 - DNA, 26 bp, Homo sapiens
agttgagacgtgtccatggcgaatcc

SEQ ID NO: 6773 - DNA, 26 bp, Homo sapiens
gttgagacgtgtccatggcgaatccc

SEQ ID NO: 6774 - DNA, 26 bp, Homo sapiens
ttgagacgtgtccatggcgaatcccc

SEQ ID NO: 6775 - DNA, 26 bp, Homo sapiens
tgagacgtgtccatggcgaatcccca

SEQ ID NO: 6776 - DNA, 26 bp, Homo sapiens
gagacgtgtccatggcgaatccccag

SEQ ID NO: 6777 - DNA, 26 bp, Homo sapiens
agacgtgtccatggcgaatccccaga

SEQ ID NO: 6778 - DNA, 26 bp, Homo sapiens
gacgtgtccatggcgaatccccagag

SEQ ID NO: 6779 - DNA, 26 bp, Homo sapiens
acgtgtccatggcgaatccccagagt

SEQ ID NO: 6780 - DNA, 26 bp, Homo sapiens
cgtgtccatggcgaatccccagagtg

SEQ ID NO: 6781 - DNA, 26 bp, Homo sapiens
gtgtccatggcgaatccccagagtga

SEQ ID NO: 6782 - DNA, 26 bp, Homo sapiens
tgtccatggcgaatccccagagtgaa

SEQ ID NO: 6783 - DNA, 26 bp, Homo sapiens
gtccatggcgaatccccagagtgaat

SEQ ID NO: 6784 - DNA, 26 bp, Homo sapiens
tccatggcgaatccccagagtgaata

SEQ ID NO: 6785 - DNA, 26 bp, Homo sapiens
ccatggcgaatccccagagtgaataa

SEQ ID NO: 6786 - DNA, 26 bp, Homo sapiens
catggcgaatccccagagtgaataag

SEQ ID NO: 6787 - DNA, 26 bp, Homo sapiens
atggcgaatccccagagtgaataagc

SEQ ID NO: 6788 - DNA, 26 bp, Homo sapiens
tggcgaatccccagagtgaataagca

SEQ ID NO: 6789 - DNA, 26 bp, Homo sapiens
ggcgaatccccagagtgaataagcag

SEQ ID NO: 6790 - DNA, 26 bp, Homo sapiens
gcgaatccccagagtgaataagcagc

SEQ ID NO: 6791 - DNA, 26 bp, Homo sapiens
cgaatccccagagtgaataagcagcc

SEQ ID NO: 6792 - DNA, 26 bp, Homo sapiens
gaatccccagagtgaataagcagccc

SEQ ID NO: 6793 - DNA, 26 bp, Homo sapiens
aatccccagagtgaataagcagcccc

SEQ ID NO: 6794 - DNA, 26 bp, Homo sapiens
atccccagagtgaataagcagccccc

SEQ ID NO: 6795 - DNA, 26 bp, Homo sapiens
tccccagagtgaataagcagccccct

SEQ ID NO: 6796 - DNA, 26 bp, Homo sapiens
ccccagagtgaataagcagccccctg

SEQ ID NO: 6797 - DNA, 26 bp, Homo sapiens
cccagagtgaataagcagccccctgc

SEQ ID NO: 6798 - DNA, 26 bp, Homo sapiens
ccagagtgaataagcagccccctgcc

SEQ ID NO: 6799 - DNA, 26 bp, Homo sapiens
cagagtgaataagcagccccctgccc

SEQ ID NO: 6800 - DNA, 26 bp, Homo sapiens
agagtgaataagcagccccctgcccc

SEQ ID NO: 6801 - DNA, 26 bp, Homo sapiens
gagtgaataagcagccccctgcccca

SEQ ID NO: 6802 - DNA, 26 bp, Homo sapiens
agtgaataagcagccccctgccccac

SEQ ID NO: 6803 - DNA, 26 bp, Homo sapiens
gtgaataagcagccccctgccccact

SEQ ID NO: 6804 - DNA, 26 bp, Homo sapiens
tgaataagcagccccctgccccactc

SEQ ID NO: 6805 - DNA, 26 bp, Homo sapiens
gaataagcagccccctgccccactcc

SEQ ID NO: 6806 - DNA, 26 bp, Homo sapiens
aataagcagccccctgccccactccc

SEQ ID NO: 6807 - DNA, 26 bp, Homo sapiens
ataagcagccccctgccccactccct

SEQ ID NO: 6808 - DNA, 26 bp, Homo sapiens
taagcagccccctgccccactccctg

SEQ ID NO: 6809 - DNA, 26 bp, Homo sapiens
aagcagccccctgccccactccctgg

SEQ ID NO: 6810 - DNA, 26 bp, Homo sapiens
agcagccccctgccccactccctggg

SEQ ID NO: 6811 - DNA, 26 bp, Homo sapiens
gcagccccctgccccactccctgggc

SEQ ID NO: 6812 - DNA, 26 bp, Homo sapiens
cagccccctgccccactccctgggcc

SEQ ID NO: 6813 - DNA, 26 bp, Homo sapiens
agccccctgccccactccctgggcct

SEQ ID NO: 6814 - DNA, 26 bp, Homo sapiens
gccccctgccccactccctgggcctt

SEQ ID NO: 6815 - DNA, 26 bp, Homo sapiens
ccccctgccccactccctgggccttc

SEQ ID NO: 6816 - DNA, 26 bp, Homo sapiens
cccctgccccactccctgggccttcc

SEQ ID NO: 6817 - DNA, 26 bp, Homo sapiens
ccctgccccactccctgggccttccc

SEQ ID NO: 6818 - DNA, 26 bp, Homo sapiens
cctgccccactccctgggccttcccc

SEQ ID NO: 6819 - DNA, 26 bp, Homo sapiens
ctgccccactccctgggccttcccct

SEQ ID NO: 6820 - DNA, 26 bp, Homo sapiens
tgccccactccctgggccttccccta

SEQ ID NO: 6821 - DNA, 26 bp, Homo sapiens
gccccactccctgggccttcccctac

SEQ ID NO: 6822 - DNA, 26 bp, Homo sapiens
ccccactccctgggccttcccctact

SEQ ID NO: 6823 - DNA, 26 bp, Homo sapiens
cccactccctgggccttcccctactc

SEQ ID NO: 6824 - DNA, 26 bp, Homo sapiens
ccactccctgggccttcccctactcc

SEQ ID NO: 6825 - DNA, 26 bp, Homo sapiens
cactccctgggccttcccctactccc

SEQ ID NO: 6826 - DNA, 26 bp, Homo sapiens
actccctgggccttcccctactcccc

SEQ ID NO: 6827 - DNA, 26 bp, Homo sapiens
ctccctgggccttcccctactcccca

SEQ ID NO: 6828 - DNA, 26 bp, Homo sapiens
tccctgggccttcccctactccccaa

SEQ ID NO: 6829 - DNA, 26 bp, Homo sapiens
ccctgggccttcccctactccccaaa

SEQ ID NO: 6830 - DNA, 26 bp, Homo sapiens
cctgggccttcccctactccccaaag

SEQ ID NO: 6831 - DNA, 26 bp, Homo sapiens
ctgggccttcccctactccccaaagc

SEQ ID NO: 6832 - DNA, 26 bp, Homo sapiens
tgggccttcccctactccccaaagca

SEQ ID NO: 6833 - DNA, 26 bp, Homo sapiens
gggccttcccctactccccaaagcag

SEQ ID NO: 6834 - DNA, 26 bp, Homo sapiens
ggccttcccctactccccaaagcagg

SEQ ID NO: 6835 - DNA, 26 bp, Homo sapiens
gccttcccctactccccaaagcaggt

SEQ ID NO: 6836 - DNA, 26 bp, Homo sapiens
ccttcccctactccccaaagcaggtc

SEQ ID NO: 6837 - DNA, 26 bp, Homo sapiens
cttcccctactccccaaagcaggtcc

SEQ ID NO: 6838 - DNA, 26 bp, Homo sapiens
ttcccctactccccaaagcaggtccc

SEQ ID NO: 6839 - DNA, 26 bp, Homo sapiens
tcccctactccccaaagcaggtccct

SEQ ID NO: 6840 - DNA, 26 bp, Homo sapiens
cccctactccccaaagcaggtccctc

SEQ ID NO: 6841 - DNA, 26 bp, Homo sapiens
ccctactccccaaagcaggtccctcc

SEQ ID NO: 6842 - DNA, 26 bp, Homo sapiens
cctactccccaaagcaggtccctcct

SEQ ID NO: 6843 - DNA, 26 bp, Homo sapiens
ctactccccaaagcaggtccctcctc

SEQ ID NO: 6844 - DNA, 26 bp, Homo sapiens
tactccccaaagcaggtccctcctca

SEQ ID NO: 6845 - DNA, 26 bp, Homo sapiens
actccccaaagcaggtccctcctcag

SEQ ID NO: 6846 - DNA, 26 bp, Homo sapiens
ctccccaaagcaggtccctcctcagc

SEQ ID NO: 6847 - DNA, 26 bp, Homo sapiens
tccccaaagcaggtccctcctcagca

SEQ ID NO: 6848 - DNA, 26 bp, Homo sapiens
ccccaaagcaggtccctcctcagcag

SEQ ID NO: 6849 - DNA, 26 bp, Homo sapiens
cccaaagcaggtccctcctcagcagt

SEQ ID NO: 6850 - DNA, 26 bp, Homo sapiens
ccaaagcaggtccctcctcagcagtt

SEQ ID NO: 6851 - DNA, 26 bp, Homo sapiens
caaagcaggtccctcctcagcagtta

SEQ ID NO: 6852 - DNA, 26 bp, Homo sapiens
aaagcaggtccctcctcagcagttag

SEQ ID NO: 6853 - DNA, 26 bp, Homo sapiens
aagcaggtccctcctcagcagttagt

SEQ ID NO: 6854 - DNA, 26 bp, Homo sapiens
agcaggtccctcctcagcagttagtt

SEQ ID NO: 6855 - DNA, 26 bp, Homo sapiens
gcaggtccctcctcagcagttagtta

SEQ ID NO: 6856 - DNA, 26 bp, Homo sapiens
caggtccctcctcagcagttagttat

SEQ ID NO: 6857 - DNA, 26 bp, Homo sapiens
aggtccctcctcagcagttagttatg

SEQ ID NO: 6858 - DNA, 26 bp, Homo sapiens
ggtccctcctcagcagttagttatgg

SEQ ID NO: 6859 - DNA, 26 bp, Homo sapiens
gtccctcctcagcagttagttatggg

SEQ ID NO: 6860 - DNA, 26 bp, Homo sapiens
tccctcctcagcagttagttatggga

SEQ ID NO: 6861 - DNA, 26 bp, Homo sapiens
ccctcctcagcagttagttatgggat

SEQ ID NO: 6862 - DNA, 26 bp, Homo sapiens
cctcctcagcagttagttatgggatt

SEQ ID NO: 6863 - DNA, 26 bp, Homo sapiens
ctcctcagcagttagttatgggattc

SEQ ID NO: 6864 - DNA, 26 bp, Homo sapiens
tcctcagcagttagttatgggattct

SEQ ID NO: 6865 - DNA, 26 bp, Homo sapiens
cctcagcagttagttatgggattctc

SEQ ID NO: 6866 - DNA, 26 bp, Homo sapiens
ctcagcagttagttatgggattctcc

SEQ ID NO: 6867 - DNA, 26 bp, Homo sapiens
tcagcagttagttatgggattctccc

SEQ ID NO: 6868 - DNA, 26 bp, Homo sapiens
cagcagttagttatgggattctcccc

SEQ ID NO: 6869 - DNA, 26 bp, Homo sapiens
agcagttagttatgggattctccccc

SEQ ID NO: 6870 - DNA, 26 bp, Homo sapiens
gcagttagttatgggattctcccccc

SEQ ID NO: 6871 - DNA, 26 bp, Homo sapiens
cagttagttatgggattctcccccct

SEQ ID NO: 6872 - DNA, 26 bp, Homo sapiens
agttagttatgggattctcccccctt

SEQ ID NO: 6873 - DNA, 26 bp, Homo sapiens
gttagttatgggattctccccccttc

SEQ ID NO: 6874 - DNA, 26 bp, Homo sapiens
ttagttatgggattctccccccttcc

SEQ ID NO: 6875 - DNA, 26 bp, Homo sapiens
tagttatgggattctccccccttcca

SEQ ID NO: 6876 - DNA, 26 bp, Homo sapiens
agttatgggattctccccccttccac

SEQ ID NO: 6877 - DNA, 26 bp, Homo sapiens
gttatgggattctccccccttccaca

SEQ ID NO: 6878 - DNA, 26 bp, Homo sapiens
ttatgggattctccccccttccacag

SEQ ID NO: 6879 - DNA, 26 bp, Homo sapiens
tatgggattctccccccttccacagt

SEQ ID NO: 6880 - DNA, 26 bp, Homo sapiens
atgggattctccccccttccacagta

SEQ ID NO: 6881 - DNA, 26 bp, Homo sapiens
tgggattctccccccttccacagtat

SEQ ID NO: 6882 - DNA, 26 bp, Homo sapiens
gggattctccccccttccacagtata

SEQ ID NO: 6883 - DNA, 26 bp, Homo sapiens
ggattctccccccttccacagtatat

SEQ ID NO: 6884 - DNA, 26 bp, Homo sapiens
gattctccccccttccacagtatatc

SEQ ID NO: 6885 - DNA, 26 bp, Homo sapiens
attctccccccttccacagtatatct

SEQ ID NO: 6886 - DNA, 26 bp, Homo sapiens
ttctccccccttccacagtatatctt

SEQ ID NO: 6887 - DNA, 26 bp, Homo sapiens
tctccccccttccacagtatatcttt

SEQ ID NO: 6888 - DNA, 26 bp, Homo sapiens
ctccccccttccacagtatatctttt

SEQ ID NO: 6889 - DNA, 26 bp, Homo sapiens
tccccccttccacagtatatcttttt

SEQ ID NO: 6890 - DNA, 26 bp, Homo sapiens
ccccccttccacagtatatctttttt

SEQ ID NO: 6891 - DNA, 26 bp, Homo sapiens
cccccttccacagtatatcttttttt

SEQ ID NO: 6892 - DNA, 26 bp, Homo sapiens
ccccttccacagtatatctttttttt

SEQ ID NO: 6893 - DNA, 26 bp, Homo sapiens
cccttccacagtatatctttttttta

SEQ ID NO: 6894 - DNA, 26 bp, Homo sapiens
ccttccacagtatatcttttttttaa

SEQ ID NO: 6895 - DNA, 26 bp, Homo sapiens
cttccacagtatatcttttttttaaa

SEQ ID NO: 6896 - DNA, 26 bp, Homo sapiens
ttccacagtatatcttttttttaaaa

SEQ ID NO: 6897 - DNA, 26 bp, Homo sapiens
tccacagtatatcttttttttaaaaa

SEQ ID NO: 6898 - DNA, 26 bp, Homo sapiens
ccacagtatatcttttttttaaaaaa

SEQ ID NO: 6899 - DNA, 26 bp, Homo sapiens
cacagtatatcttttttttaaaaaat

SEQ ID NO: 6900 - DNA, 26 bp, Homo sapiens
acagtatatcttttttttaaaaaata

SEQ ID NO: 6901 - DNA, 26 bp, Homo sapiens
cagtatatcttttttttaaaaaatat

SEQ ID NO: 6902 - DNA, 26 bp, Homo sapiens
agtatatcttttttttaaaaaatatt

SEQ ID NO: 6903 - DNA, 26 bp, Homo sapiens
gtatatcttttttttaaaaaatattt

SEQ ID NO: 6904 - DNA, 26 bp, Homo sapiens
tatatcttttttttaaaaaatatttt

SEQ ID NO: 6905 - DNA, 26 bp, Homo sapiens
atatcttttttttaaaaaatattttt

SEQ ID NO: 6906 - DNA, 26 bp, Homo sapiens
tatcttttttttaaaaaatatttttt

SEQ ID NO: 6907 - DNA, 26 bp, Homo sapiens
atcttttttttaaaaaatattttttt

SEQ ID NO: 6908 - DNA, 26 bp, Homo sapiens
tcttttttttaaaaaatatttttttt

SEQ ID NO: 6909 - DNA, 26 bp, Homo sapiens
cttttttttaaaaaatattttttttc

SEQ ID NO: 6910 - DNA, 26 bp, Homo sapiens
ttttttttaaaaaatattttttttcc

SEQ ID NO: 6911 - DNA, 26 bp, Homo sapiens
tttttttaaaaaatattttttttcca

SEQ ID NO: 6912 - DNA, 26 bp, Homo sapiens
ttttttaaaaaatattttttttccat

SEQ ID NO: 6913 - DNA, 26 bp, Homo sapiens
tttttaaaaaatattttttttccatc

SEQ ID NO: 6914 - DNA, 26 bp, Homo sapiens
ttttaaaaaatattttttttccatca

SEQ ID NO: 6915 - DNA, 26 bp, Homo sapiens
tttaaaaaatattttttttccatcaa

SEQ ID NO: 6916 - DNA, 26 bp, Homo sapiens
ttaaaaaatattttttttccatcaag

SEQ ID NO: 6917 - DNA, 26 bp, Homo sapiens
taaaaaatattttttttccatcaagg

SEQ ID NO: 6918 - DNA, 26 bp, Homo sapiens
aaaaaatattttttttccatcaaggt

SEQ ID NO: 6919 - DNA, 26 bp, Homo sapiens
aaaaatattttttttccatcaaggtc

SEQ ID NO: 6920 - DNA, 26 bp, Homo sapiens
aaaatattttttttccatcaaggtca

SEQ ID NO: 6921 - DNA, 26 bp, Homo sapiens
aaatattttttttccatcaaggtcat

SEQ ID NO: 6922 - DNA, 26 bp, Homo sapiens
aatattttttttccatcaaggtcatc

SEQ ID NO: 6923 - DNA, 26 bp, Homo sapiens
atattttttttccatcaaggtcatct

SEQ ID NO: 6924 - DNA, 26 bp, Homo sapiens
tattttttttccatcaaggtcatctt

SEQ ID NO: 6925 - DNA, 26 bp, Homo sapiens
attttttttccatcaaggtcatcttc

SEQ ID NO: 6926 - DNA, 26 bp, Homo sapiens
ttttttttccatcaaggtcatcttct

SEQ ID NO: 6927 - DNA, 26 bp, Homo sapiens
tttttttccatcaaggtcatcttctg

SEQ ID NO: 6928 - DNA, 26 bp, Homo sapiens
ttttttccatcaaggtcatcttctgt

SEQ ID NO: 6929 - DNA, 26 bp, Homo sapiens
tttttccatcaaggtcatcttctgtt

SEQ ID NO: 6930 - DNA, 26 bp, Homo sapiens
ttttccatcaaggtcatcttctgttt

SEQ ID NO: 6931 - DNA, 26 bp, Homo sapiens
tttccatcaaggtcatcttctgtttt

SEQ ID NO: 6932 - DNA, 26 bp, Homo sapiens
ttccatcaaggtcatcttctgttttt

SEQ ID NO: 6933 - DNA, 26 bp, Homo sapiens
tccatcaaggtcatcttctgtttttc

SEQ ID NO: 6934 - DNA, 26 bp, Homo sapiens
ccatcaaggtcatcttctgtttttct

SEQ ID NO: 6935 - DNA, 26 bp, Homo sapiens
catcaaggtcatcttctgtttttctt

SEQ ID NO: 6936 - DNA, 26 bp, Homo sapiens
atcaaggtcatcttctgtttttcttt

SEQ ID NO: 6937 - DNA, 26 bp, Homo sapiens
tcaaggtcatcttctgtttttctttt

SEQ ID NO: 6938 - DNA, 26 bp, Homo sapiens
caaggtcatcttctgtttttcttttt

SEQ ID NO: 6939 - DNA, 26 bp, Homo sapiens
aaggtcatcttctgtttttctttttt

SEQ ID NO: 6940 - DNA, 26 bp, Homo sapiens
aggtcatcttctgtttttcttttttt

SEQ ID NO: 6941 - DNA, 26 bp, Homo sapiens
ggtcatcttctgtttttctttttttt

SEQ ID NO: 6942 - DNA, 26 bp, Homo sapiens
gtcatcttctgtttttcttttttttt

SEQ ID NO: 6943 - DNA, 26 bp, Homo sapiens
tcatcttctgtttttctttttttttt

SEQ ID NO: 6944 - DNA, 26 bp, Homo sapiens
catcttctgtttttcttttttttttt

SEQ ID NO: 6945 - DNA, 26 bp, Homo sapiens
atcttctgtttttctttttttttttt

SEQ ID NO: 6946 - DNA, 26 bp, Homo sapiens
tcttctgtttttcttttttttttttt

SEQ ID NO: 6947 - DNA, 26 bp, Homo sapiens
cttctgtttttctttttttttttttt

SEQ ID NO: 6948 - DNA, 26 bp, Homo sapiens
ttctgtttttctttttttttttttta

SEQ ID NO: 6949 - DNA, 26 bp, Homo sapiens
tctgtttttcttttttttttttttaa

SEQ ID NO: 6950 - DNA, 26 bp, Homo sapiens
ctgtttttcttttttttttttttaat

SEQ ID NO: 6951 - DNA, 26 bp, Homo sapiens
tgtttttcttttttttttttttaatt

SEQ ID NO: 6952 - DNA, 26 bp, Homo sapiens
gtttttcttttttttttttttaattc

SEQ ID NO: 6953 - DNA, 26 bp, Homo sapiens
tttttcttttttttttttttaattct

SEQ ID NO: 6954 - DNA, 26 bp, Homo sapiens
ttttcttttttttttttttaattctt

SEQ ID NO: 6955 - DNA, 26 bp, Homo sapiens
tttcttttttttttttttaattcttt

SEQ ID NO: 6956 - DNA, 26 bp, Homo sapiens
ttcttttttttttttttaattctttt

SEQ ID NO: 6957 - DNA, 26 bp, Homo sapiens
tcttttttttttttttaattcttttt

SEQ ID NO: 6958 - DNA, 26 bp, Homo sapiens
cttttttttttttttaattctttttt

SEQ ID NO: 6959 - DNA, 26 bp, Homo sapiens
ttttttttttttttaattcttttttt

SEQ ID NO: 6960 - DNA, 26 bp, Homo sapiens
tttttttttttttaattctttttttt

SEQ ID NO: 6961 - DNA, 26 bp, Homo sapiens
ttttttttttttaattcttttttttt

SEQ ID NO: 6962 - DNA, 26 bp, Homo sapiens
tttttttttttaattctttttttttt

SEQ ID NO: 6963 - DNA, 26 bp, Homo sapiens
ttttttttttaattcttttttttttc

SEQ ID NO: 6964 - DNA, 26 bp, Homo sapiens
tttttttttaattcttttttttttcc

SEQ ID NO: 6965 - DNA, 26 bp, Homo sapiens
ttttttttaattcttttttttttcct

SEQ ID NO: 6966 - DNA, 26 bp, Homo sapiens
tttttttaattcttttttttttcctt

SEQ ID NO: 6967 - DNA, 26 bp, Homo sapiens
ttttttaattcttttttttttccttc

SEQ ID NO: 6968 - DNA, 26 bp, Homo sapiens
tttttaattcttttttttttccttct

SEQ ID NO: 6969 - DNA, 26 bp, Homo sapiens
ttttaattcttttttttttccttctt

SEQ ID NO: 6970 - DNA, 26 bp, Homo sapiens
tttaattcttttttttttccttcttt

SEQ ID NO: 6971 - DNA, 26 bp, Homo sapiens
ttaattcttttttttttccttctttc

SEQ ID NO: 6972 - DNA, 26 bp, Homo sapiens
taattcttttttttttccttctttcc

SEQ ID NO: 6973 - DNA, 26 bp, Homo sapiens
aattcttttttttttccttctttcct

SEQ ID NO: 6974 - DNA, 26 bp, Homo sapiens
attcttttttttttccttctttcctc

SEQ ID NO: 6975 - DNA, 26 bp, Homo sapiens
ttcttttttttttccttctttcctct

SEQ ID NO: 6976 - DNA, 26 bp, Homo sapiens
tcttttttttttccttctttcctctt

SEQ ID NO: 6977 - DNA, 26 bp, Homo sapiens
cttttttttttccttctttcctcttt

SEQ ID NO: 6978 - DNA, 26 bp, Homo sapiens
ttttttttttccttctttcctctttt

SEQ ID NO: 6979 - DNA, 26 bp, Homo sapiens
tttttttttccttctttcctcttttt

SEQ ID NO: 6980 - DNA, 26 bp, Homo sapiens
ttttttttccttctttcctctttttt

SEQ ID NO: 6981 - DNA, 26 bp, Homo sapiens
tttttttccttctttcctcttttttt

SEQ ID NO: 6982 - DNA, 26 bp, Homo sapiens
ttttttccttctttcctctttttttc

SEQ ID NO: 6983 - DNA, 26 bp, Homo sapiens
tttttccttctttcctctttttttcc

SEQ ID NO: 6984 - DNA, 26 bp, Homo sapiens
ttttccttctttcctctttttttcct

SEQ ID NO: 6985 - DNA, 26 bp, Homo sapiens
tttccttctttcctctttttttcctc

SEQ ID NO: 6986 - DNA, 26 bp, Homo sapiens
ttccttctttcctctttttttcctct

SEQ ID NO: 6987 - DNA, 26 bp, Homo sapiens
tccttctttcctctttttttcctctc

SEQ ID NO: 6988 - DNA, 26 bp, Homo sapiens
ccttctttcctctttttttcctctct

SEQ ID NO: 6989 - DNA, 26 bp, Homo sapiens
cttctttcctctttttttcctctctc

SEQ ID NO: 6990 - DNA, 26 bp, Homo sapiens
ttctttcctctttttttcctctctct

SEQ ID NO: 6991 - DNA, 26 bp, Homo sapiens
tctttcctctttttttcctctctctc

SEQ ID NO: 6992 - DNA, 26 bp, Homo sapiens
ctttcctctttttttcctctctctcc

SEQ ID NO: 6993 - DNA, 26 bp, Homo sapiens
tttcctctttttttcctctctctcct

SEQ ID NO: 6994 - DNA, 26 bp, Homo sapiens
ttcctctttttttcctctctctcctc

SEQ ID NO: 6995 - DNA, 26 bp, Homo sapiens
tcctctttttttcctctctctcctcc

SEQ ID NO: 6996 - DNA, 26 bp, Homo sapiens
cctctttttttcctctctctcctcct

SEQ ID NO: 6997 - DNA, 26 bp, Homo sapiens
ctctttttttcctctctctcctccta

SEQ ID NO: 6998 - DNA, 26 bp, Homo sapiens
tctttttttcctctctctcctcctaa

SEQ ID NO: 6999 - DNA, 26 bp, Homo sapiens
ctttttttcctctctctcctcctaat

SEQ ID NO: 7000 - DNA, 26 bp, Homo sapiens
tttttttcctctctctcctcctaata

SEQ ID NO: 7001 - DNA, 26 bp, Homo sapiens
ttttttcctctctctcctcctaatac

SEQ ID NO: 7002 - DNA, 26 bp, Homo sapiens
tttttcctctctctcctcctaataca

SEQ ID NO: 7003 - DNA, 26 bp, Homo sapiens
ttttcctctctctcctcctaatacac

SEQ ID NO: 7004 - DNA, 26 bp, Homo sapiens
tttcctctctctcctcctaatacaca

SEQ ID NO: 7005 - DNA, 26 bp, Homo sapiens
ttcctctctctcctcctaatacacac

SEQ ID NO: 7006 - DNA, 26 bp, Homo sapiens
tcctctctctcctcctaatacacact

SEQ ID NO: 7007 - DNA, 26 bp, Homo sapiens
cctctctctcctcctaatacacactt

SEQ ID NO: 7008 - DNA, 26 bp, Homo sapiens
ctctctctcctcctaatacacacttt

SEQ ID NO: 7009 - DNA, 26 bp, Homo sapiens
tctctctcctcctaatacacactttt

SEQ ID NO: 7010 - DNA, 26 bp, Homo sapiens
ctctctcctcctaatacacacttttt

SEQ ID NO: 7011 - DNA, 26 bp, Homo sapiens
tctctcctcctaatacacactttttt

SEQ ID NO: 7012 - DNA, 26 bp, Homo sapiens
ctctcctcctaatacacacttttttt

SEQ ID NO: 7013 - DNA, 26 bp, Homo sapiens
tctcctcctaatacacacttttttta

SEQ ID NO: 7014 - DNA, 26 bp, Homo sapiens
ctcctcctaatacacactttttttag

SEQ ID NO: 7015 - DNA, 26 bp, Homo sapiens
tcctcctaatacacactttttttagt

SEQ ID NO: 7016 - DNA, 26 bp, Homo sapiens
cctcctaatacacactttttttagta

SEQ ID NO: 7017 - DNA, 26 bp, Homo sapiens
ctcctaatacacactttttttagtaa

SEQ ID NO: 7018 - DNA, 26 bp, Homo sapiens
tcctaatacacactttttttagtaag

SEQ ID NO: 7019 - DNA, 26 bp, Homo sapiens
cctaatacacactttttttagtaagg

SEQ ID NO: 7020 - DNA, 26 bp, Homo sapiens
ctaatacacactttttttagtaaggg

SEQ ID NO: 7021 - DNA, 26 bp, Homo sapiens
taatacacactttttttagtaagggg

SEQ ID NO: 7022 - DNA, 26 bp, Homo sapiens
aatacacactttttttagtaagggga

SEQ ID NO: 7023 - DNA, 26 bp, Homo sapiens
atacacactttttttagtaaggggaa

SEQ ID NO: 7024 - DNA, 26 bp, Homo sapiens
tacacactttttttagtaaggggaat

SEQ ID NO: 7025 - DNA, 26 bp, Homo sapiens
acacactttttttagtaaggggaata

SEQ ID NO: 7026 - DNA, 26 bp, Homo sapiens
cacactttttttagtaaggggaatac

SEQ ID NO: 7027 - DNA, 26 bp, Homo sapiens
acactttttttagtaaggggaatacc

SEQ ID NO: 7028 - DNA, 26 bp, Homo sapiens
cactttttttagtaaggggaatacca

SEQ ID NO: 7029 - DNA, 26 bp, Homo sapiens
actttttttagtaaggggaataccat

SEQ ID NO: 7030 - DNA, 26 bp, Homo sapiens
ctttttttagtaaggggaataccatg

SEQ ID NO: 7031 - DNA, 26 bp, Homo sapiens
tttttttagtaaggggaataccatga

SEQ ID NO: 7032 - DNA, 26 bp, Homo sapiens
ttttttagtaaggggaataccatgat

SEQ ID NO: 7033 - DNA, 26 bp, Homo sapiens
tttttagtaaggggaataccatgatg

SEQ ID NO: 7034 - DNA, 26 bp, Homo sapiens
ttttagtaaggggaataccatgatgt

SEQ ID NO: 7035 - DNA, 26 bp, Homo sapiens
tttagtaaggggaataccatgatgtc

SEQ ID NO: 7036 - DNA, 26 bp, Homo sapiens
ttagtaaggggaataccatgatgtcg

SEQ ID NO: 7037 - DNA, 26 bp, Homo sapiens
tagtaaggggaataccatgatgtcgc

SEQ ID NO: 7038 - DNA, 26 bp, Homo sapiens
agtaaggggaataccatgatgtcgct

SEQ ID NO: 7039 - DNA, 26 bp, Homo sapiens
gtaaggggaataccatgatgtcgctc

SEQ ID NO: 7040 - DNA, 26 bp, Homo sapiens
taaggggaataccatgatgtcgctct

SEQ ID NO: 7041 - DNA, 26 bp, Homo sapiens
aaggggaataccatgatgtcgctcta

SEQ ID NO: 7042 - DNA, 26 bp, Homo sapiens
aggggaataccatgatgtcgctctag

SEQ ID NO: 7043 - DNA, 26 bp, Homo sapiens
ggggaataccatgatgtcgctctagc

SEQ ID NO: 7044 - DNA, 26 bp, Homo sapiens
gggaataccatgatgtcgctctagcc

SEQ ID NO: 7045 - DNA, 26 bp, Homo sapiens
ggaataccatgatgtcgctctagccc

SEQ ID NO: 7046 - DNA, 26 bp, Homo sapiens
gaataccatgatgtcgctctagcccg

SEQ ID NO: 7047 - DNA, 26 bp, Homo sapiens
aataccatgatgtcgctctagcccgg

SEQ ID NO: 7048 - DNA, 26 bp, Homo sapiens
ataccatgatgtcgctctagcccggc

SEQ ID NO: 7049 - DNA, 26 bp, Homo sapiens
taccatgatgtcgctctagcccggcc

SEQ ID NO: 7050 - DNA, 26 bp, Homo sapiens
accatgatgtcgctctagcccggccc

SEQ ID NO: 7051 - DNA, 26 bp, Homo sapiens
ccatgatgtcgctctagcccggcccc

SEQ ID NO: 7052 - DNA, 26 bp, Homo sapiens
catgatgtcgctctagcccggcccct

SEQ ID NO: 7053 - DNA, 26 bp, Homo sapiens
atgatgtcgctctagcccggcccctg

SEQ ID NO: 7054 - DNA, 26 bp, Homo sapiens
tgatgtcgctctagcccggcccctgt

SEQ ID NO: 7055 - DNA, 26 bp, Homo sapiens
gatgtcgctctagcccggcccctgta

SEQ ID NO: 7056 - DNA, 26 bp, Homo sapiens
atgtcgctctagcccggcccctgtag

SEQ ID NO: 7057 - DNA, 26 bp, Homo sapiens
tgtcgctctagcccggcccctgtaga

SEQ ID NO: 7058 - DNA, 26 bp, Homo sapiens
gtcgctctagcccggcccctgtagac

SEQ ID NO: 7059 - DNA, 26 bp, Homo sapiens
tcgctctagcccggcccctgtagacg

SEQ ID NO: 7060 - DNA, 26 bp, Homo sapiens
cgctctagcccggcccctgtagacgc

SEQ ID NO: 7061 - DNA, 26 bp, Homo sapiens
gctctagcccggcccctgtagacgcg

SEQ ID NO: 7062 - DNA, 26 bp, Homo sapiens
ctctagcccggcccctgtagacgcga

SEQ ID NO: 7063 - DNA, 26 bp, Homo sapiens
tctagcccggcccctgtagacgcgac

SEQ ID NO: 7064 - DNA, 26 bp, Homo sapiens
ctagcccggcccctgtagacgcgacc

SEQ ID NO: 7065 - DNA, 26 bp, Homo sapiens
tagcccggcccctgtagacgcgaccc

SEQ ID NO: 7066 - DNA, 26 bp, Homo sapiens
agcccggcccctgtagacgcgacccc

SEQ ID NO: 7067 - DNA, 26 bp, Homo sapiens
gcccggcccctgtagacgcgaccccg

SEQ ID NO: 7068 - DNA, 26 bp, Homo sapiens
cccggcccctgtagacgcgaccccgg

SEQ ID NO: 7069 - DNA, 26 bp, Homo sapiens
ccggcccctgtagacgcgaccccggg

SEQ ID NO: 7070 - DNA, 26 bp, Homo sapiens
cggcccctgtagacgcgaccccgggg

SEQ ID NO: 7071 - DNA, 26 bp, Homo sapiens
ggcccctgtagacgcgaccccggggc

SEQ ID NO: 7072 - DNA, 26 bp, Homo sapiens
gcccctgtagacgcgaccccggggcc

SEQ ID NO: 7073 - DNA, 26 bp, Homo sapiens
cccctgtagacgcgaccccggggcct

SEQ ID NO: 7074 - DNA, 26 bp, Homo sapiens
ccctgtagacgcgaccccggggcctg

SEQ ID NO: 7075 - DNA, 26 bp, Homo sapiens
cctgtagacgcgaccccggggcctgc

SEQ ID NO: 7076 - DNA, 26 bp, Homo sapiens
ctgtagacgcgaccccggggcctgct

SEQ ID NO: 7077 - DNA, 26 bp, Homo sapiens
tgtagacgcgaccccggggcctgctg

SEQ ID NO: 7078 - DNA, 26 bp, Homo sapiens
gtagacgcgaccccggggcctgctgt

SEQ ID NO: 7079 - DNA, 26 bp, Homo sapiens
tagacgcgaccccggggcctgctgtt

SEQ ID NO: 7080 - DNA, 26 bp, Homo sapiens
agacgcgaccccggggcctgctgtta

SEQ ID NO: 7081 - DNA, 26 bp, Homo sapiens
gacgcgaccccggggcctgctgttaa

SEQ ID NO: 7082 - DNA, 26 bp, Homo sapiens
acgcgaccccggggcctgctgttaaa

SEQ ID NO: 7083 - DNA, 26 bp, Homo sapiens
cgcgaccccggggcctgctgttaaaa

SEQ ID NO: 7084 - DNA, 26 bp, Homo sapiens
gcgaccccggggcctgctgttaaaac

SEQ ID NO: 7085 - DNA, 26 bp, Homo sapiens
cgaccccggggcctgctgttaaaacc

SEQ ID NO: 7086 - DNA, 26 bp, Homo sapiens
gaccccggggcctgctgttaaaacca

SEQ ID NO: 7087 - DNA, 26 bp, Homo sapiens
accccggggcctgctgttaaaaccac

SEQ ID NO: 7088 - DNA, 26 bp, Homo sapiens
ccccggggcctgctgttaaaaccact

SEQ ID NO: 7089 - DNA, 26 bp, Homo sapiens
cccggggcctgctgttaaaaccactg

SEQ ID NO: 7090 - DNA, 26 bp, Homo sapiens
ccggggcctgctgttaaaaccactgt

SEQ ID NO: 7091 - DNA, 26 bp, Homo sapiens
cggggcctgctgttaaaaccactgta

SEQ ID NO: 7092 - DNA, 26 bp, Homo sapiens
ggggcctgctgttaaaaccactgtag

SEQ ID NO: 7093 - DNA, 26 bp, Homo sapiens
gggcctgctgttaaaaccactgtaga

SEQ ID NO: 7094 - DNA, 26 bp, Homo sapiens
ggcctgctgttaaaaccactgtagaa

SEQ ID NO: 7095 - DNA, 26 bp, Homo sapiens
gcctgctgttaaaaccactgtagaat

SEQ ID NO: 7096 - DNA, 26 bp, Homo sapiens
cctgctgttaaaaccactgtagaatc

SEQ ID NO: 7097 - DNA, 26 bp, Homo sapiens
ctgctgttaaaaccactgtagaatcg

SEQ ID NO: 7098 - DNA, 26 bp, Homo sapiens
tgctgttaaaaccactgtagaatcga

SEQ ID NO: 7099 - DNA, 26 bp, Homo sapiens
gctgttaaaaccactgtagaatcgag

SEQ ID NO: 7100 - DNA, 26 bp, Homo sapiens
ctgttaaaaccactgtagaatcgaga

SEQ ID NO: 7101 - DNA, 26 bp, Homo sapiens
tgttaaaaccactgtagaatcgagag

SEQ ID NO: 7102 - DNA, 26 bp, Homo sapiens
gttaaaaccactgtagaatcgagagc

SEQ ID NO: 7103 - DNA, 26 bp, Homo sapiens
ttaaaaccactgtagaatcgagagcg

SEQ ID NO: 7104 - DNA, 26 bp, Homo sapiens
taaaaccactgtagaatcgagagcgg

SEQ ID NO: 7105 - DNA, 26 bp, Homo sapiens
aaaaccactgtagaatcgagagcggg

SEQ ID NO: 7106 - DNA, 26 bp, Homo sapiens
aaaccactgtagaatcgagagcggga

SEQ ID NO: 7107 - DNA, 26 bp, Homo sapiens
aaccactgtagaatcgagagcgggag

SEQ ID NO: 7108 - DNA, 26 bp, Homo sapiens
accactgtagaatcgagagcgggagc

SEQ ID NO: 7109 - DNA, 26 bp, Homo sapiens
ccactgtagaatcgagagcgggagct

SEQ ID NO: 7110 - DNA, 26 bp, Homo sapiens
cactgtagaatcgagagcgggagctg

SEQ ID NO: 7111 - DNA, 26 bp, Homo sapiens
actgtagaatcgagagcgggagctgt

SEQ ID NO: 7112 - DNA, 26 bp, Homo sapiens
ctgtagaatcgagagcgggagctgtt

SEQ ID NO: 7113 - DNA, 26 bp, Homo sapiens
tgtagaatcgagagcgggagctgttg

SEQ ID NO: 7114 - DNA, 26 bp, Homo sapiens
gtagaatcgagagcgggagctgttgt

SEQ ID NO: 7115 - DNA, 26 bp, Homo sapiens
tagaatcgagagcgggagctgttgta

SEQ ID NO: 7116 - DNA, 26 bp, Homo sapiens
agaatcgagagcgggagctgttgtag

SEQ ID NO: 7117 - DNA, 26 bp, Homo sapiens
gaatcgagagcgggagctgttgtagt

SEQ ID NO: 7118 - DNA, 26 bp, Homo sapiens
aatcgagagcgggagctgttgtagtt

SEQ ID NO: 7119 - DNA, 26 bp, Homo sapiens
atcgagagcgggagctgttgtagttg

SEQ ID NO: 7120 - DNA, 26 bp, Homo sapiens
tcgagagcgggagctgttgtagttgg

SEQ ID NO: 7121 - DNA, 26 bp, Homo sapiens
cgagagcgggagctgttgtagttggt

SEQ ID NO: 7122 - DNA, 26 bp, Homo sapiens
gagagcgggagctgttgtagttggtg

SEQ ID NO: 7123 - DNA, 26 bp, Homo sapiens
agagcgggagctgttgtagttggtgg

SEQ ID NO: 7124 - DNA, 26 bp, Homo sapiens
gagcgggagctgttgtagttggtggt

SEQ ID NO: 7125 - DNA, 26 bp, Homo sapiens
agcgggagctgttgtagttggtggtc

SEQ ID NO: 7126 - DNA, 26 bp, Homo sapiens
gcgggagctgttgtagttggtggtcc

SEQ ID NO: 7127 - DNA, 26 bp, Homo sapiens
cgggagctgttgtagttggtggtccg

SEQ ID NO: 7128 - DNA, 26 bp, Homo sapiens
gggagctgttgtagttggtggtccgg

SEQ ID NO: 7129 - DNA, 26 bp, Homo sapiens
ggagctgttgtagttggtggtccggg

SEQ ID NO: 7130 - DNA, 26 bp, Homo sapiens
gagctgttgtagttggtggtccgggc

SEQ ID NO: 7131 - DNA, 26 bp, Homo sapiens
agctgttgtagttggtggtccgggcg

SEQ ID NO: 7132 - DNA, 26 bp, Homo sapiens
gctgttgtagttggtggtccgggcgc

SEQ ID NO: 7133 - DNA, 26 bp, Homo sapiens
ctgttgtagttggtggtccgggcgcg

SEQ ID NO: 7134 - DNA, 26 bp, Homo sapiens
tgttgtagttggtggtccgggcgcgg

SEQ ID NO: 7135 - DNA, 26 bp, Homo sapiens
gttgtagttggtggtccgggcgcggt

SEQ ID NO: 7136 - DNA, 26 bp, Homo sapiens
ttgtagttggtggtccgggcgcggta

SEQ ID NO: 7137 - DNA, 26 bp, Homo sapiens
tgtagttggtggtccgggcgcggtag

SEQ ID NO: 7138 - DNA, 26 bp, Homo sapiens
gtagttggtggtccgggcgcggtagc

SEQ ID NO: 7139 - DNA, 26 bp, Homo sapiens
tagttggtggtccgggcgcggtagcg

SEQ ID NO: 7140 - DNA, 26 bp, Homo sapiens
agttggtggtccgggcgcggtagcgg

SEQ ID NO: 7141 - DNA, 26 bp, Homo sapiens
gttggtggtccgggcgcggtagcggg

SEQ ID NO: 7142 - DNA, 26 bp, Homo sapiens
ttggtggtccgggcgcggtagcgggc

SEQ ID NO: 7143 - DNA, 26 bp, Homo sapiens
tggtggtccgggcgcggtagcgggct

SEQ ID NO: 7144 - DNA, 26 bp, Homo sapiens
ggtggtccgggcgcggtagcgggctc

SEQ ID NO: 7145 - DNA, 26 bp, Homo sapiens
gtggtccgggcgcggtagcgggctcg

SEQ ID NO: 7146 - DNA, 26 bp, Homo sapiens
tggtccgggcgcggtagcgggctcgt

SEQ ID NO: 7147 - DNA, 26 bp, Homo sapiens
ggtccgggcgcggtagcgggctcgtg

SEQ ID NO: 7148 - DNA, 26 bp, Homo sapiens
gtccgggcgcggtagcgggctcgtgg

SEQ ID NO: 7149 - DNA, 26 bp, Homo sapiens
tccgggcgcggtagcgggctcgtgga

SEQ ID NO: 7150 - DNA, 26 bp, Homo sapiens
ccgggcgcggtagcgggctcgtggaa

SEQ ID NO: 7151 - DNA, 26 bp, Homo sapiens
cgggcgcggtagcgggctcgtggaaa

SEQ ID NO: 7152 - DNA, 26 bp, Homo sapiens
gggcgcggtagcgggctcgtggaaaa

SEQ ID NO: 7153 - DNA, 26 bp, Homo sapiens
ggcgcggtagcgggctcgtggaaaac

SEQ ID NO: 7154 - DNA, 26 bp, Homo sapiens
gcgcggtagcgggctcgtggaaaacc

SEQ ID NO: 7155 - DNA, 26 bp, Homo sapiens
cgcggtagcgggctcgtggaaaaccc

SEQ ID NO: 7156 - DNA, 26 bp, Homo sapiens
gcggtagcgggctcgtggaaaacccc

SEQ ID NO: 7157 - DNA, 26 bp, Homo sapiens
cggtagcgggctcgtggaaaaccccg

SEQ ID NO: 7158 - DNA, 26 bp, Homo sapiens
ggtagcgggctcgtggaaaaccccgg

SEQ ID NO: 7159 - DNA, 26 bp, Homo sapiens
gtagcgggctcgtggaaaaccccggt

SEQ ID NO: 7160 - DNA, 26 bp, Homo sapiens
tagcgggctcgtggaaaaccccggtc

SEQ ID NO: 7161 - DNA, 26 bp, Homo sapiens
agcgggctcgtggaaaaccccggtct

SEQ ID NO: 7162 - DNA, 26 bp, Homo sapiens
gcgggctcgtggaaaaccccggtctg

SEQ ID NO: 7163 - DNA, 26 bp, Homo sapiens
cgggctcgtggaaaaccccggtctgt

SEQ ID NO: 7164 - DNA, 26 bp, Homo sapiens
gggctcgtggaaaaccccggtctgtt

SEQ ID NO: 7165 - DNA, 26 bp, Homo sapiens
ggctcgtggaaaaccccggtctgttg

SEQ ID NO: 7166 - DNA, 26 bp, Homo sapiens
gctcgtggaaaaccccggtctgttgt

SEQ ID NO: 7167 - DNA, 26 bp, Homo sapiens
ctcgtggaaaaccccggtctgttgtg

SEQ ID NO: 7168 - DNA, 26 bp, Homo sapiens
tcgtggaaaaccccggtctgttgtgc

SEQ ID NO: 7169 - DNA, 26 bp, Homo sapiens
cgtggaaaaccccggtctgttgtgct

SEQ ID NO: 7170 - DNA, 26 bp, Homo sapiens
gtggaaaaccccggtctgttgtgctg

SEQ ID NO: 7171 - DNA, 26 bp, Homo sapiens
tggaaaaccccggtctgttgtgctga

SEQ ID NO: 7172 - DNA, 26 bp, Homo sapiens
ggaaaaccccggtctgttgtgctgat

SEQ ID NO: 7173 - DNA, 26 bp, Homo sapiens
gaaaaccccggtctgttgtgctgatg

SEQ ID NO: 7174 - DNA, 26 bp, Homo sapiens
aaaaccccggtctgttgtgctgatgc

SEQ ID NO: 7175 - DNA, 26 bp, Homo sapiens
aaaccccggtctgttgtgctgatgcc

SEQ ID NO: 7176 - DNA, 26 bp, Homo sapiens
aaccccggtctgttgtgctgatgcct

SEQ ID NO: 7177 - DNA, 26 bp, Homo sapiens
accccggtctgttgtgctgatgcctg

SEQ ID NO: 7178 - DNA, 26 bp, Homo sapiens
ccccggtctgttgtgctgatgcctgg

SEQ ID NO: 7179 - DNA, 26 bp, Homo sapiens
cccggtctgttgtgctgatgcctggt

SEQ ID NO: 7180 - DNA, 26 bp, Homo sapiens
ccggtctgttgtgctgatgcctggtc

SEQ ID NO: 7181 - DNA, 26 bp, Homo sapiens
cggtctgttgtgctgatgcctggtct

SEQ ID NO: 7182 - DNA, 26 bp, Homo sapiens
ggtctgttgtgctgatgcctggtctg

SEQ ID NO: 7183 - DNA, 26 bp, Homo sapiens
gtctgttgtgctgatgcctggtctgt

SEQ ID NO: 7184 - DNA, 26 bp, Homo sapiens
tctgttgtgctgatgcctggtctgtt

SEQ ID NO: 7185 - DNA, 26 bp, Homo sapiens
ctgttgtgctgatgcctggtctgttg

SEQ ID NO: 7186 - DNA, 26 bp, Homo sapiens
tgttgtgctgatgcctggtctgttgg

SEQ ID NO: 7187 - DNA, 26 bp, Homo sapiens
gttgtgctgatgcctggtctgttggt

SEQ ID NO: 7188 - DNA, 26 bp, Homo sapiens
ttgtgctgatgcctggtctgttggtt

SEQ ID NO: 7189 - DNA, 26 bp, Homo sapiens
tgtgctgatgcctggtctgttggttc

SEQ ID NO: 7190 - DNA, 26 bp, Homo sapiens
gtgctgatgcctggtctgttggttcg

SEQ ID NO: 7191 - DNA, 26 bp, Homo sapiens
tgctgatgcctggtctgttggttcgt

SEQ ID NO: 7192 - DNA, 26 bp, Homo sapiens
gctgatgcctggtctgttggttcgtt

SEQ ID NO: 7193 - DNA, 26 bp, Homo sapiens
ctgatgcctggtctgttggttcgttt

SEQ ID NO: 7194 - DNA, 26 bp, Homo sapiens
tgatgcctggtctgttggttcgtttt

SEQ ID NO: 7195 - DNA, 26 bp, Homo sapiens
gatgcctggtctgttggttcgttttg

SEQ ID NO: 7196 - DNA, 26 bp, Homo sapiens
atgcctggtctgttggttcgttttgg

SEQ ID NO: 7197 - DNA, 26 bp, Homo sapiens
tgcctggtctgttggttcgttttggg

SEQ ID NO: 7198 - DNA, 26 bp, Homo sapiens
gcctggtctgttggttcgttttggga

SEQ ID NO: 7199 - DNA, 26 bp, Homo sapiens
cctggtctgttggttcgttttgggat

SEQ ID NO: 7200 - DNA, 26 bp, Homo sapiens
ctggtctgttggttcgttttgggatc

SEQ ID NO: 7201 - DNA, 26 bp, Homo sapiens
tggtctgttggttcgttttgggatca

SEQ ID NO: 7202 - DNA, 26 bp, Homo sapiens
ggtctgttggttcgttttgggatcac

SEQ ID NO: 7203 - DNA, 26 bp, Homo sapiens
gtctgttggttcgttttgggatcacc

SEQ ID NO: 7204 - DNA, 26 bp, Homo sapiens
tctgttggttcgttttgggatcacct

SEQ ID NO: 7205 - DNA, 26 bp, Homo sapiens
ctgttggttcgttttgggatcacctt

SEQ ID NO: 7206 - DNA, 26 bp, Homo sapiens
tgttggttcgttttgggatcaccttg

SEQ ID NO: 7207 - DNA, 26 bp, Homo sapiens
gttggttcgttttgggatcaccttga

SEQ ID NO: 7208 - DNA, 26 bp, Homo sapiens
ttggttcgttttgggatcaccttgat

SEQ ID NO: 7209 - DNA, 26 bp, Homo sapiens
tggttcgttttgggatcaccttgatt

SEQ ID NO: 7210 - DNA, 26 bp, Homo sapiens
ggttcgttttgggatcaccttgattt

SEQ ID NO: 7211 - DNA, 26 bp, Homo sapiens
gttcgttttgggatcaccttgatttg

SEQ ID NO: 7212 - DNA, 26 bp, Homo sapiens
ttcgttttgggatcaccttgatttgc

SEQ ID NO: 7213 - DNA, 26 bp, Homo sapiens
tcgttttgggatcaccttgatttgcc

SEQ ID NO: 7214 - DNA, 26 bp, Homo sapiens
cgttttgggatcaccttgatttgcct

SEQ ID NO: 7215 - DNA, 26 bp, Homo sapiens
gttttgggatcaccttgatttgcctt

SEQ ID NO: 7216 - DNA, 26 bp, Homo sapiens
ttttgggatcaccttgatttgccttc

SEQ ID NO: 7217 - DNA, 26 bp, Homo sapiens
tttgggatcaccttgatttgccttcc

SEQ ID NO: 7218 - DNA, 26 bp, Homo sapiens
ttgggatcaccttgatttgccttcct

SEQ ID NO: 7219 - DNA, 26 bp, Homo sapiens
tgggatcaccttgatttgccttcctc

SEQ ID NO: 7220 - DNA, 26 bp, Homo sapiens
gggatcaccttgatttgccttcctct

SEQ ID NO: 7221 - DNA, 26 bp, Homo sapiens
ggatcaccttgatttgccttcctcta

SEQ ID NO: 7222 - DNA, 26 bp, Homo sapiens
gatcaccttgatttgccttcctctaa

SEQ ID NO: 7223 - DNA, 26 bp, Homo sapiens
atcaccttgatttgccttcctctaaa

SEQ ID NO: 7224 - DNA, 26 bp, Homo sapiens
tcaccttgatttgccttcctctaaat

SEQ ID NO: 7225 - DNA, 26 bp, Homo sapiens
caccttgatttgccttcctctaaata

SEQ ID NO: 7226 - DNA, 26 bp, Homo sapiens
accttgatttgccttcctctaaatag

SEQ ID NO: 7227 - DNA, 26 bp, Homo sapiens
ccttgatttgccttcctctaaatagg

SEQ ID NO: 7228 - DNA, 26 bp, Homo sapiens
cttgatttgccttcctctaaataggg

SEQ ID NO: 7229 - DNA, 26 bp, Homo sapiens
ttgatttgccttcctctaaataggga

SEQ ID NO: 7230 - DNA, 26 bp, Homo sapiens
tgatttgccttcctctaaatagggac

SEQ ID NO: 7231 - DNA, 26 bp, Homo sapiens
gatttgccttcctctaaatagggact

SEQ ID NO: 7232 - DNA, 26 bp, Homo sapiens
atttgccttcctctaaatagggactc

SEQ ID NO: 7233 - DNA, 26 bp, Homo sapiens
tttgccttcctctaaatagggactca

SEQ ID NO: 7234 - DNA, 26 bp, Homo sapiens
ttgccttcctctaaatagggactcat

SEQ ID NO: 7235 - DNA, 26 bp, Homo sapiens
tgccttcctctaaatagggactcatc

SEQ ID NO: 7236 - DNA, 26 bp, Homo sapiens
gccttcctctaaatagggactcatct

SEQ ID NO: 7237 - DNA, 26 bp, Homo sapiens
ccttcctctaaatagggactcatcta

SEQ ID NO: 7238 - DNA, 26 bp, Homo sapiens
cttcctctaaatagggactcatctaa

SEQ ID NO: 7239 - DNA, 26 bp, Homo sapiens
ttcctctaaatagggactcatctaag

SEQ ID NO: 7240 - DNA, 26 bp, Homo sapiens
tcctctaaatagggactcatctaagg

SEQ ID NO: 7241 - DNA, 26 bp, Homo sapiens
cctctaaatagggactcatctaaggc

SEQ ID NO: 7242 - DNA, 26 bp, Homo sapiens
ctctaaatagggactcatctaaggcc

SEQ ID NO: 7243 - DNA, 26 bp, Homo sapiens
tctaaatagggactcatctaaggcca

SEQ ID NO: 7244 - DNA, 26 bp, Homo sapiens
ctaaatagggactcatctaaggccaa

SEQ ID NO: 7245 - DNA, 26 bp, Homo sapiens
taaatagggactcatctaaggccaag

SEQ ID NO: 7246 - DNA, 26 bp, Homo sapiens
aaatagggactcatctaaggccaagg

SEQ ID NO: 7247 - DNA, 26 bp, Homo sapiens
aatagggactcatctaaggccaagga

SEQ ID NO: 7248 - DNA, 26 bp, Homo sapiens
atagggactcatctaaggccaaggaa

SEQ ID NO: 7249 - DNA, 26 bp, Homo sapiens
tagggactcatctaaggccaaggaag

SEQ ID NO: 7250 - DNA, 26 bp, Homo sapiens
agggactcatctaaggccaaggaagt

SEQ ID NO: 7251 - DNA, 26 bp, Homo sapiens
gggactcatctaaggccaaggaagtc

SEQ ID NO: 7252 - DNA, 26 bp, Homo sapiens
ggactcatctaaggccaaggaagtcc

SEQ ID NO: 7253 - DNA, 26 bp, Homo sapiens
gactcatctaaggccaaggaagtcct

SEQ ID NO: 7254 - DNA, 26 bp, Homo sapiens
actcatctaaggccaaggaagtcctc

SEQ ID NO: 7255 - DNA, 26 bp, Homo sapiens
ctcatctaaggccaaggaagtcctca

SEQ ID NO: 7256 - DNA, 26 bp, Homo sapiens
tcatctaaggccaaggaagtcctcac

SEQ ID NO: 7257 - DNA, 26 bp, Homo sapiens
catctaaggccaaggaagtcctcact

SEQ ID NO: 7258 - DNA, 26 bp, Homo sapiens
atctaaggccaaggaagtcctcactg

SEQ ID NO: 7259 - DNA, 26 bp, Homo sapiens
tctaaggccaaggaagtcctcactga

SEQ ID NO: 7260 - DNA, 26 bp, Homo sapiens
ctaaggccaaggaagtcctcactgac

SEQ ID NO: 7261 - DNA, 26 bp, Homo sapiens
taaggccaaggaagtcctcactgact

SEQ ID NO: 7262 - DNA, 26 bp, Homo sapiens
aaggccaaggaagtcctcactgactc

SEQ ID NO: 7263 - DNA, 26 bp, Homo sapiens
aggccaaggaagtcctcactgactct

SEQ ID NO: 7264 - DNA, 26 bp, Homo sapiens
ggccaaggaagtcctcactgactctt

SEQ ID NO: 7265 - DNA, 26 bp, Homo sapiens
gccaaggaagtcctcactgactcttt

SEQ ID NO: 7266 - DNA, 26 bp, Homo sapiens
ccaaggaagtcctcactgactctttg

SEQ ID NO: 7267 - DNA, 26 bp, Homo sapiens
caaggaagtcctcactgactctttgt

SEQ ID NO: 7268 - DNA, 26 bp, Homo sapiens
aaggaagtcctcactgactctttgtc

SEQ ID NO: 7269 - DNA, 26 bp, Homo sapiens
aggaagtcctcactgactctttgtct

SEQ ID NO: 7270 - DNA, 26 bp, Homo sapiens
ggaagtcctcactgactctttgtctg

SEQ ID NO: 7271 - DNA, 26 bp, Homo sapiens
gaagtcctcactgactctttgtctga

SEQ ID NO: 7272 - DNA, 26 bp, Homo sapiens
aagtcctcactgactctttgtctgag

SEQ ID NO: 7273 - DNA, 26 bp, Homo sapiens
agtcctcactgactctttgtctgaga

SEQ ID NO: 7274 - DNA, 26 bp, Homo sapiens
gtcctcactgactctttgtctgagaa

SEQ ID NO: 7275 - DNA, 26 bp, Homo sapiens
tcctcactgactctttgtctgagaac

SEQ ID NO: 7276 - DNA, 26 bp, Homo sapiens
cctcactgactctttgtctgagaact

SEQ ID NO: 7277 - DNA, 26 bp, Homo sapiens
ctcactgactctttgtctgagaactc

SEQ ID NO: 7278 - DNA, 26 bp, Homo sapiens
tcactgactctttgtctgagaactct

SEQ ID NO: 7279 - DNA, 26 bp, Homo sapiens
cactgactctttgtctgagaactcta

SEQ ID NO: 7280 - DNA, 26 bp, Homo sapiens
actgactctttgtctgagaactctat

SEQ ID NO: 7281 - DNA, 26 bp, Homo sapiens
ctgactctttgtctgagaactctata

SEQ ID NO: 7282 - DNA, 26 bp, Homo sapiens
tgactctttgtctgagaactctatat

SEQ ID NO: 7283 - DNA, 26 bp, Homo sapiens
gactctttgtctgagaactctatata

SEQ ID NO: 7284 - DNA, 26 bp, Homo sapiens
actctttgtctgagaactctatatac

SEQ ID NO: 7285 - DNA, 26 bp, Homo sapiens
ctctttgtctgagaactctatatacg

SEQ ID NO: 7286 - DNA, 26 bp, Homo sapiens
tctttgtctgagaactctatatacgc

SEQ ID NO: 7287 - DNA, 26 bp, Homo sapiens
ctttgtctgagaactctatatacgca

SEQ ID NO: 7288 - DNA, 26 bp, Homo sapiens
tttgtctgagaactctatatacgcaa

SEQ ID NO: 7289 - DNA, 26 bp, Homo sapiens
ttgtctgagaactctatatacgcaaa

SEQ ID NO: 7290 - DNA, 26 bp, Homo sapiens
tgtctgagaactctatatacgcaaac

SEQ ID NO: 7291 - DNA, 26 bp, Homo sapiens
gtctgagaactctatatacgcaaacc

SEQ ID NO: 7292 - DNA, 26 bp, Homo sapiens
tctgagaactctatatacgcaaaccc

SEQ ID NO: 7293 - DNA, 26 bp, Homo sapiens
ctgagaactctatatacgcaaaccct

SEQ ID NO: 7294 - DNA, 26 bp, Homo sapiens
tgagaactctatatacgcaaaccctt

SEQ ID NO: 7295 - DNA, 26 bp, Homo sapiens
gagaactctatatacgcaaacccttt

SEQ ID NO: 7296 - DNA, 26 bp, Homo sapiens
agaactctatatacgcaaaccctttg

SEQ ID NO: 7297 - DNA, 26 bp, Homo sapiens
gaactctatatacgcaaaccctttgg

SEQ ID NO: 7298 - DNA, 26 bp, Homo sapiens
aactctatatacgcaaaccctttggg

SEQ ID NO: 7299 - DNA, 26 bp, Homo sapiens
actctatatacgcaaaccctttggga

SEQ ID NO: 7300 - DNA, 26 bp, Homo sapiens
ctctatatacgcaaaccctttgggat

SEQ ID NO: 7301 - DNA, 26 bp, Homo sapiens
tctatatacgcaaaccctttgggatg

SEQ ID NO: 7302 - DNA, 26 bp, Homo sapiens
ctatatacgcaaaccctttgggatgg

SEQ ID NO: 7303 - DNA, 26 bp, Homo sapiens
tatatacgcaaaccctttgggatggc

SEQ ID NO: 7304 - DNA, 26 bp, Homo sapiens
atatacgcaaaccctttgggatggcc

SEQ ID NO: 7305 - DNA, 26 bp, Homo sapiens
tatacgcaaaccctttgggatggcca

SEQ ID NO: 7306 - DNA, 26 bp, Homo sapiens
atacgcaaaccctttgggatggccac

SEQ ID NO: 7307 - DNA, 26 bp, Homo sapiens
tacgcaaaccctttgggatggccact

SEQ ID NO: 7308 - DNA, 26 bp, Homo sapiens
acgcaaaccctttgggatggccacta

SEQ ID NO: 7309 - DNA, 26 bp, Homo sapiens
cgcaaaccctttgggatggccactaa

SEQ ID NO: 7310 - DNA, 26 bp, Homo sapiens
gcaaaccctttgggatggccactaaa

SEQ ID NO: 7311 - DNA, 26 bp, Homo sapiens
caaaccctttgggatggccactaaat

SEQ ID NO: 7312 - DNA, 26 bp, Homo sapiens
aaaccctttgggatggccactaaatt

SEQ ID NO: 7313 - DNA, 26 bp, Homo sapiens
aaccctttgggatggccactaaattt

SEQ ID NO: 7314 - DNA, 26 bp, Homo sapiens
accctttgggatggccactaaatttg

SEQ ID NO: 7315 - DNA, 26 bp, Homo sapiens
ccctttgggatggccactaaatttgt

SEQ ID NO: 7316 - DNA, 26 bp, Homo sapiens
cctttgggatggccactaaatttgtc

SEQ ID NO: 7317 - DNA, 26 bp, Homo sapiens
ctttgggatggccactaaatttgtca

SEQ ID NO: 7318 - DNA, 26 bp, Homo sapiens
tttgggatggccactaaatttgtcac

SEQ ID NO: 7319 - DNA, 26 bp, Homo sapiens
ttgggatggccactaaatttgtcaca

SEQ ID NO: 7320 - DNA, 26 bp, Homo sapiens
tgggatggccactaaatttgtcacac

SEQ ID NO: 7321 - DNA, 26 bp, Homo sapiens
gggatggccactaaatttgtcacaca

SEQ ID NO: 7322 - DNA, 26 bp, Homo sapiens
ggatggccactaaatttgtcacacag

SEQ ID NO: 7323 - DNA, 26 bp, Homo sapiens
gatggccactaaatttgtcacacagt

SEQ ID NO: 7324 - DNA, 26 bp, Homo sapiens
atggccactaaatttgtcacacagta

SEQ ID NO: 7325 - DNA, 26 bp, Homo sapiens
tggccactaaatttgtcacacagtat

SEQ ID NO: 7326 - DNA, 26 bp, Homo sapiens
ggccactaaatttgtcacacagtatg

SEQ ID NO: 7327 - DNA, 26 bp, Homo sapiens
gccactaaatttgtcacacagtatgg

SEQ ID NO: 7328 - DNA, 26 bp, Homo sapiens
ccactaaatttgtcacacagtatggt

SEQ ID NO: 7329 - DNA, 26 bp, Homo sapiens
cactaaatttgtcacacagtatggta

SEQ ID NO: 7330 - DNA, 26 bp, Homo sapiens
actaaatttgtcacacagtatggtaa

SEQ ID NO: 7331 - DNA, 26 bp, Homo sapiens
ctaaatttgtcacacagtatggtaac

SEQ ID NO: 7332 - DNA, 26 bp, Homo sapiens
taaatttgtcacacagtatggtaaca

SEQ ID NO: 7333 - DNA, 26 bp, Homo sapiens
aaatttgtcacacagtatggtaacac

SEQ ID NO: 7334 - DNA, 26 bp, Homo sapiens
aatttgtcacacagtatggtaacacg

SEQ ID NO: 7335 - DNA, 26 bp, Homo sapiens
atttgtcacacagtatggtaacacgg

SEQ ID NO: 7336 - DNA, 26 bp, Homo sapiens
tttgtcacacagtatggtaacacggt

SEQ ID NO: 7337 - DNA, 26 bp, Homo sapiens
ttgtcacacagtatggtaacacggtt

SEQ ID NO: 7338 - DNA, 26 bp, Homo sapiens
tgtcacacagtatggtaacacggttg

SEQ ID NO: 7339 - DNA, 26 bp, Homo sapiens
gtcacacagtatggtaacacggttga

SEQ ID NO: 7340 - DNA, 26 bp, Homo sapiens
tcacacagtatggtaacacggttgac

SEQ ID NO: 7341 - DNA, 26 bp, Homo sapiens
cacacagtatggtaacacggttgact

SEQ ID NO: 7342 - DNA, 26 bp, Homo sapiens
acacagtatggtaacacggttgactg

SEQ ID NO: 7343 - DNA, 26 bp, Homo sapiens
cacagtatggtaacacggttgactga

SEQ ID NO: 7344 - DNA, 26 bp, Homo sapiens
acagtatggtaacacggttgactgaa

SEQ ID NO: 7345 - DNA, 26 bp, Homo sapiens
cagtatggtaacacggttgactgaac

SEQ ID NO: 7346 - DNA, 26 bp, Homo sapiens
agtatggtaacacggttgactgaacc

SEQ ID NO: 7347 - DNA, 26 bp, Homo sapiens
gtatggtaacacggttgactgaacca

SEQ ID NO: 7348 - DNA, 26 bp, Homo sapiens
tatggtaacacggttgactgaaccac

SEQ ID NO: 7349 - DNA, 26 bp, Homo sapiens
atggtaacacggttgactgaaccaca

SEQ ID NO: 7350 - DNA, 26 bp, Homo sapiens
tggtaacacggttgactgaaccacag

SEQ ID NO: 7351 - DNA, 26 bp, Homo sapiens
ggtaacacggttgactgaaccacagc

SEQ ID NO: 7352 - DNA, 26 bp, Homo sapiens
gtaacacggttgactgaaccacagcc

SEQ ID NO: 7353 - DNA, 26 bp, Homo sapiens
taacacggttgactgaaccacagcca

SEQ ID NO: 7354 - DNA, 26 bp, Homo sapiens
aacacggttgactgaaccacagccat

SEQ ID NO: 7355 - DNA, 26 bp, Homo sapiens
acacggttgactgaaccacagccatg

SEQ ID NO: 7356 - DNA, 26 bp, Homo sapiens
cacggttgactgaaccacagccatga

SEQ ID NO: 7357 - DNA, 26 bp, Homo sapiens
acggttgactgaaccacagccatgaa

SEQ ID NO: 7358 - DNA, 26 bp, Homo sapiens
cggttgactgaaccacagccatgaaa

SEQ ID NO: 7359 - DNA, 26 bp, Homo sapiens
ggttgactgaaccacagccatgaaag

SEQ ID NO: 7360 - DNA, 26 bp, Homo sapiens
gttgactgaaccacagccatgaaagt

SEQ ID NO: 7361 - DNA, 26 bp, Homo sapiens
ttgactgaaccacagccatgaaagtg

SEQ ID NO: 7362 - DNA, 26 bp, Homo sapiens
tgactgaaccacagccatgaaagtga

SEQ ID NO: 7363 - DNA, 26 bp, Homo sapiens
gactgaaccacagccatgaaagtgag

SEQ ID NO: 7364 - DNA, 26 bp, Homo sapiens
actgaaccacagccatgaaagtgagc

SEQ ID NO: 7365 - DNA, 26 bp, Homo sapiens
ctgaaccacagccatgaaagtgagct

SEQ ID NO: 7366 - DNA, 26 bp, Homo sapiens
tgaaccacagccatgaaagtgagctt

SEQ ID NO: 7367 - DNA, 26 bp, Homo sapiens
gaaccacagccatgaaagtgagcttc

SEQ ID NO: 7368 - DNA, 26 bp, Homo sapiens
aaccacagccatgaaagtgagcttcc

SEQ ID NO: 7369 - DNA, 26 bp, Homo sapiens
accacagccatgaaagtgagcttcca

SEQ ID NO: 7370 - DNA, 26 bp, Homo sapiens
ccacagccatgaaagtgagcttccag

SEQ ID NO: 7371 - DNA, 26 bp, Homo sapiens
cacagccatgaaagtgagcttccagc

SEQ ID NO: 7372 - DNA, 26 bp, Homo sapiens
acagccatgaaagtgagcttccagct

SEQ ID NO: 7373 - DNA, 26 bp, Homo sapiens
cagccatgaaagtgagcttccagctc

SEQ ID NO: 7374 - DNA, 26 bp, Homo sapiens
agccatgaaagtgagcttccagctct

SEQ ID NO: 7375 - DNA, 26 bp, Homo sapiens
gccatgaaagtgagcttccagctctt

SEQ ID NO: 7376 - DNA, 26 bp, Homo sapiens
ccatgaaagtgagcttccagctcttc

SEQ ID NO: 7377 - DNA, 26 bp, Homo sapiens
catgaaagtgagcttccagctcttct

SEQ ID NO: 7378 - DNA, 26 bp, Homo sapiens
atgaaagtgagcttccagctcttctg

SEQ ID NO: 7379 - DNA, 26 bp, Homo sapiens
tgaaagtgagcttccagctcttctgc

SEQ ID NO: 7380 - DNA, 26 bp, Homo sapiens
gaaagtgagcttccagctcttctgct

SEQ ID NO: 7381 - DNA, 26 bp, Homo sapiens
aaagtgagcttccagctcttctgctg

SEQ ID NO: 7382 - DNA, 26 bp, Homo sapiens
aagtgagcttccagctcttctgctgt

SEQ ID NO: 7383 - DNA, 26 bp, Homo sapiens
agtgagcttccagctcttctgctgtt

SEQ ID NO: 7384 - DNA, 26 bp, Homo sapiens
gtgagcttccagctcttctgctgttg

SEQ ID NO: 7385 - DNA, 26 bp, Homo sapiens
tgagcttccagctcttctgctgttgc

SEQ ID NO: 7386 - DNA, 26 bp, Homo sapiens
gagcttccagctcttctgctgttgca

SEQ ID NO: 7387 - DNA, 26 bp, Homo sapiens
agcttccagctcttctgctgttgcac

SEQ ID NO: 7388 - DNA, 26 bp, Homo sapiens
gcttccagctcttctgctgttgcacc

SEQ ID NO: 7389 - DNA, 26 bp, Homo sapiens
cttccagctcttctgctgttgcacca

SEQ ID NO: 7390 - DNA, 26 bp, Homo sapiens
ttccagctcttctgctgttgcaccat

SEQ ID NO: 7391 - DNA, 26 bp, Homo sapiens
tccagctcttctgctgttgcaccata

SEQ ID NO: 7392 - DNA, 26 bp, Homo sapiens
ccagctcttctgctgttgcaccatag

SEQ ID NO: 7393 - DNA, 26 bp, Homo sapiens
cagctcttctgctgttgcaccatagt

SEQ ID NO: 7394 - DNA, 26 bp, Homo sapiens
agctcttctgctgttgcaccatagtc

SEQ ID NO: 7395 - DNA, 26 bp, Homo sapiens
gctcttctgctgttgcaccatagtcc

SEQ ID NO: 7396 - DNA, 26 bp, Homo sapiens
ctcttctgctgttgcaccatagtcca

SEQ ID NO: 7397 - DNA, 26 bp, Homo sapiens
tcttctgctgttgcaccatagtccac

SEQ ID NO: 7398 - DNA, 26 bp, Homo sapiens
cttctgctgttgcaccatagtccaca

SEQ ID NO: 7399 - DNA, 26 bp, Homo sapiens
ttctgctgttgcaccatagtccacat

SEQ ID NO: 7400 - DNA, 26 bp, Homo sapiens
tctgctgttgcaccatagtccacatt

SEQ ID NO: 7401 - DNA, 26 bp, Homo sapiens
ctgctgttgcaccatagtccacattg

SEQ ID NO: 7402 - DNA, 26 bp, Homo sapiens
tgctgttgcaccatagtccacattgc

SEQ ID NO: 7403 - DNA, 26 bp, Homo sapiens
gctgttgcaccatagtccacattgcc

SEQ ID NO: 7404 - DNA, 26 bp, Homo sapiens
ctgttgcaccatagtccacattgcca

SEQ ID NO: 7405 - DNA, 26 bp, Homo sapiens
tgttgcaccatagtccacattgccaa

SEQ ID NO: 7406 - DNA, 26 bp, Homo sapiens
gttgcaccatagtccacattgccaac

SEQ ID NO: 7407 - DNA, 26 bp, Homo sapiens
ttgcaccatagtccacattgccaaca

SEQ ID NO: 7408 - DNA, 26 bp, Homo sapiens
tgcaccatagtccacattgccaacat

SEQ ID NO: 7409 - DNA, 26 bp, Homo sapiens
gcaccatagtccacattgccaacata

SEQ ID NO: 7410 - DNA, 26 bp, Homo sapiens
caccatagtccacattgccaacatag

SEQ ID NO: 7411 - DNA, 26 bp, Homo sapiens
accatagtccacattgccaacataga

SEQ ID NO: 7412 - DNA, 26 bp, Homo sapiens
ccatagtccacattgccaacatagat

SEQ ID NO: 7413 - DNA, 26 bp, Homo sapiens
catagtccacattgccaacatagatg

SEQ ID NO: 7414 - DNA, 26 bp, Homo sapiens
atagtccacattgccaacatagatgg

SEQ ID NO: 7415 - DNA, 26 bp, Homo sapiens
tagtccacattgccaacatagatgga

SEQ ID NO: 7416 - DNA, 26 bp, Homo sapiens
agtccacattgccaacatagatggaa

SEQ ID NO: 7417 - DNA, 26 bp, Homo sapiens
gtccacattgccaacatagatggaac

SEQ ID NO: 7418 - DNA, 26 bp, Homo sapiens
tccacattgccaacatagatggaacg

SEQ ID NO: 7419 - DNA, 26 bp, Homo sapiens
ccacattgccaacatagatggaacgg

SEQ ID NO: 7420 - DNA, 26 bp, Homo sapiens
cacattgccaacatagatggaacggg

SEQ ID NO: 7421 - DNA, 26 bp, Homo sapiens
acattgccaacatagatggaacgggc

SEQ ID NO: 7422 - DNA, 26 bp, Homo sapiens
cattgccaacatagatggaacgggca

SEQ ID NO: 7423 - DNA, 26 bp, Homo sapiens
attgccaacatagatggaacgggcat

SEQ ID NO: 7424 - DNA, 26 bp, Homo sapiens
ttgccaacatagatggaacgggcatc

SEQ ID NO: 7425 - DNA, 26 bp, Homo sapiens
tgccaacatagatggaacgggcatca

SEQ ID NO: 7426 - DNA, 26 bp, Homo sapiens
gccaacatagatggaacgggcatcag

SEQ ID NO: 7427 - DNA, 26 bp, Homo sapiens
ccaacatagatggaacgggcatcagc

SEQ ID NO: 7428 - DNA, 26 bp, Homo sapiens
caacatagatggaacgggcatcagcc

SEQ ID NO: 7429 - DNA, 26 bp, Homo sapiens
aacatagatggaacgggcatcagcct

SEQ ID NO: 7430 - DNA, 26 bp, Homo sapiens
acatagatggaacgggcatcagcctc

SEQ ID NO: 7431 - DNA, 26 bp, Homo sapiens
catagatggaacgggcatcagcctcc

SEQ ID NO: 7432 - DNA, 26 bp, Homo sapiens
atagatggaacgggcatcagcctcca

SEQ ID NO: 7433 - DNA, 26 bp, Homo sapiens
tagatggaacgggcatcagcctccat

SEQ ID NO: 7434 - DNA, 26 bp, Homo sapiens
agatggaacgggcatcagcctccatc

SEQ ID NO: 7435 - DNA, 26 bp, Homo sapiens
gatggaacgggcatcagcctccatct

SEQ ID NO: 7436 - DNA, 26 bp, Homo sapiens
atggaacgggcatcagcctccatctt

SEQ ID NO: 7437 - DNA, 26 bp, Homo sapiens
tggaacgggcatcagcctccatcttc

SEQ ID NO: 7438 - DNA, 26 bp, Homo sapiens
ggaacgggcatcagcctccatcttct

SEQ ID NO: 7439 - DNA, 26 bp, Homo sapiens
gaacgggcatcagcctccatcttctc

SEQ ID NO: 7440 - DNA, 26 bp, Homo sapiens
aacgggcatcagcctccatcttctcc

SEQ ID NO: 7441 - DNA, 26 bp, Homo sapiens
acgggcatcagcctccatcttctcct

SEQ ID NO: 7442 - DNA, 26 bp, Homo sapiens
cgggcatcagcctccatcttctcctc

SEQ ID NO: 7443 - DNA, 26 bp, Homo sapiens
gggcatcagcctccatcttctcctca

SEQ ID NO: 7444 - DNA, 26 bp, Homo sapiens
ggcatcagcctccatcttctcctcaa

SEQ ID NO: 7445 - DNA, 26 bp, Homo sapiens
gcatcagcctccatcttctcctcaat

SEQ ID NO: 7446 - DNA, 26 bp, Homo sapiens
catcagcctccatcttctcctcaatg

SEQ ID NO: 7447 - DNA, 26 bp, Homo sapiens
atcagcctccatcttctcctcaatgg

SEQ ID NO: 7448 - DNA, 26 bp, Homo sapiens
tcagcctccatcttctcctcaatgga

SEQ ID NO: 7449 - DNA, 26 bp, Homo sapiens
cagcctccatcttctcctcaatggac

SEQ ID NO: 7450 - DNA, 26 bp, Homo sapiens
agcctccatcttctcctcaatggaca

SEQ ID NO: 7451 - DNA, 26 bp, Homo sapiens
gcctccatcttctcctcaatggacat

SEQ ID NO: 7452 - DNA, 26 bp, Homo sapiens
cctccatcttctcctcaatggacatg

SEQ ID NO: 7453 - DNA, 26 bp, Homo sapiens
ctccatcttctcctcaatggacatga

SEQ ID NO: 7454 - DNA, 26 bp, Homo sapiens
tccatcttctcctcaatggacatgat

SEQ ID NO: 7455 - DNA, 26 bp, Homo sapiens
ccatcttctcctcaatggacatgatc

SEQ ID NO: 7456 - DNA, 26 bp, Homo sapiens
catcttctcctcaatggacatgatca

SEQ ID NO: 7457 - DNA, 26 bp, Homo sapiens
atcttctcctcaatggacatgatcac

SEQ ID NO: 7458 - DNA, 26 bp, Homo sapiens
tcttctcctcaatggacatgatcacc

SEQ ID NO: 7459 - DNA, 26 bp, Homo sapiens
cttctcctcaatggacatgatcaccg

SEQ ID NO: 7460 - DNA, 26 bp, Homo sapiens
ttctcctcaatggacatgatcaccgg

SEQ ID NO: 7461 - DNA, 26 bp, Homo sapiens
tctcctcaatggacatgatcaccggg

SEQ ID NO: 7462 - DNA, 26 bp, Homo sapiens
ctcctcaatggacatgatcaccgggc

SEQ ID NO: 7463 - DNA, 26 bp, Homo sapiens
tcctcaatggacatgatcaccgggcc

SEQ ID NO: 7464 - DNA, 26 bp, Homo sapiens
cctcaatggacatgatcaccgggcca

SEQ ID NO: 7465 - DNA, 26 bp, Homo sapiens
ctcaatggacatgatcaccgggccag

SEQ ID NO: 7466 - DNA, 26 bp, Homo sapiens
tcaatggacatgatcaccgggccagc

SEQ ID NO: 7467 - DNA, 26 bp, Homo sapiens
caatggacatgatcaccgggccagca

SEQ ID NO: 7468 - DNA, 26 bp, Homo sapiens
aatggacatgatcaccgggccagcat

SEQ ID NO: 7469 - DNA, 26 bp, Homo sapiens
atggacatgatcaccgggccagcatt

SEQ ID NO: 7470 - DNA, 26 bp, Homo sapiens
tggacatgatcaccgggccagcattg

SEQ ID NO: 7471 - DNA, 26 bp, Homo sapiens
ggacatgatcaccgggccagcattgc

SEQ ID NO: 7472 - DNA, 26 bp, Homo sapiens
gacatgatcaccgggccagcattgcc

SEQ ID NO: 7473 - DNA, 26 bp, Homo sapiens
acatgatcaccgggccagcattgcct

SEQ ID NO: 7474 - DNA, 26 bp, Homo sapiens
catgatcaccgggccagcattgcctg

SEQ ID NO: 7475 - DNA, 26 bp, Homo sapiens
atgatcaccgggccagcattgcctgg

SEQ ID NO: 7476 - DNA, 26 bp, Homo sapiens
tgatcaccgggccagcattgcctgga

SEQ ID NO: 7477 - DNA, 26 bp, Homo sapiens
gatcaccgggccagcattgcctggag

SEQ ID NO: 7478 - DNA, 26 bp, Homo sapiens
atcaccgggccagcattgcctggagg

SEQ ID NO: 7479 - DNA, 26 bp, Homo sapiens
tcaccgggccagcattgcctggaggt

SEQ ID NO: 7480 - DNA, 26 bp, Homo sapiens
caccgggccagcattgcctggaggtg

SEQ ID NO: 7481 - DNA, 26 bp, Homo sapiens
accgggccagcattgcctggaggtgg

SEQ ID NO: 7482 - DNA, 26 bp, Homo sapiens
ccgggccagcattgcctggaggtgga

SEQ ID NO: 7483 - DNA, 26 bp, Homo sapiens
cgggccagcattgcctggaggtggac

SEQ ID NO: 7484 - DNA, 26 bp, Homo sapiens
gggccagcattgcctggaggtggact

SEQ ID NO: 7485 - DNA, 26 bp, Homo sapiens
ggccagcattgcctggaggtggactc

SEQ ID NO: 7486 - DNA, 26 bp, Homo sapiens
gccagcattgcctggaggtggactca

SEQ ID NO: 7487 - DNA, 26 bp, Homo sapiens
ccagcattgcctggaggtggactcat

SEQ ID NO: 7488 - DNA, 26 bp, Homo sapiens
cagcattgcctggaggtggactcata

SEQ ID NO: 7489 - DNA, 26 bp, Homo sapiens
agcattgcctggaggtggactcatat

SEQ ID NO: 7490 - DNA, 26 bp, Homo sapiens
gcattgcctggaggtggactcatatt

SEQ ID NO: 7491 - DNA, 26 bp, Homo sapiens
cattgcctggaggtggactcatattc

SEQ ID NO: 7492 - DNA, 26 bp, Homo sapiens
attgcctggaggtggactcatattca

SEQ ID NO: 7493 - DNA, 26 bp, Homo sapiens
ttgcctggaggtggactcatattcat

SEQ ID NO: 7494 - DNA, 26 bp, Homo sapiens
tgcctggaggtggactcatattcatc

SEQ ID NO: 7495 - DNA, 26 bp, Homo sapiens
gcctggaggtggactcatattcatct

SEQ ID NO: 7496 - DNA, 26 bp, Homo sapiens
cctggaggtggactcatattcatctg

SEQ ID NO: 7497 - DNA, 26 bp, Homo sapiens
ctggaggtggactcatattcatctgc

SEQ ID NO: 7498 - DNA, 26 bp, Homo sapiens
tggaggtggactcatattcatctgct

SEQ ID NO: 7499 - DNA, 26 bp, Homo sapiens
ggaggtggactcatattcatctgctt

SEQ ID NO: 7500 - DNA, 26 bp, Homo sapiens
gaggtggactcatattcatctgcttc

SEQ ID NO: 7501 - DNA, 26 bp, Homo sapiens
aggtggactcatattcatctgcttct

SEQ ID NO: 7502 - DNA, 26 bp, Homo sapiens
ggtggactcatattcatctgcttctc

SEQ ID NO: 7503 - DNA, 26 bp, Homo sapiens
gtggactcatattcatctgcttctct

SEQ ID NO: 7504 - DNA, 26 bp, Homo sapiens
tggactcatattcatctgcttctcta

SEQ ID NO: 7505 - DNA, 26 bp, Homo sapiens
ggactcatattcatctgcttctctac

SEQ ID NO: 7506 - DNA, 26 bp, Homo sapiens
gactcatattcatctgcttctctacc

SEQ ID NO: 7507 - DNA, 26 bp, Homo sapiens
actcatattcatctgcttctctacct

SEQ ID NO: 7508 - DNA, 26 bp, Homo sapiens
ctcatattcatctgcttctctacctc

SEQ ID NO: 7509 - DNA, 26 bp, Homo sapiens
tcatattcatctgcttctctacctcg

SEQ ID NO: 7510 - DNA, 26 bp, Homo sapiens
catattcatctgcttctctacctcgt

SEQ ID NO: 7511 - DNA, 26 bp, Homo sapiens
atattcatctgcttctctacctcgtt

SEQ ID NO: 7512 - DNA, 26 bp, Homo sapiens
tattcatctgcttctctacctcgttc

SEQ ID NO: 7513 - DNA, 26 bp, Homo sapiens
attcatctgcttctctacctcgttct

SEQ ID NO: 7514 - DNA, 26 bp, Homo sapiens
ttcatctgcttctctacctcgttctg

SEQ ID NO: 7515 - DNA, 26 bp, Homo sapiens
tcatctgcttctctacctcgttctgt

SEQ ID NO: 7516 - DNA, 26 bp, Homo sapiens
catctgcttctctacctcgttctgta

SEQ ID NO: 7517 - DNA, 26 bp, Homo sapiens
atctgcttctctacctcgttctgtag

SEQ ID NO: 7518 - DNA, 26 bp, Homo sapiens
tctgcttctctacctcgttctgtagc

SEQ ID NO: 7519 - DNA, 26 bp, Homo sapiens
ctgcttctctacctcgttctgtagct

SEQ ID NO: 7520 - DNA, 26 bp, Homo sapiens
tgcttctctacctcgttctgtagctc

SEQ ID NO: 7521 - DNA, 26 bp, Homo sapiens
gcttctctacctcgttctgtagctcc

SEQ ID NO: 7522 - DNA, 26 bp, Homo sapiens
cttctctacctcgttctgtagctcct

SEQ ID NO: 7523 - DNA, 26 bp, Homo sapiens
ttctctacctcgttctgtagctcctt

SEQ ID NO: 7524 - DNA, 26 bp, Homo sapiens
tctctacctcgttctgtagctccttt

SEQ ID NO: 7525 - DNA, 26 bp, Homo sapiens
ctctacctcgttctgtagctccttta

SEQ ID NO: 7526 - DNA, 26 bp, Homo sapiens
tctacctcgttctgtagctcctttag

SEQ ID NO: 7527 - DNA, 26 bp, Homo sapiens
ctacctcgttctgtagctcctttagc

SEQ ID NO: 7528 - DNA, 26 bp, Homo sapiens
tacctcgttctgtagctcctttagct

SEQ ID NO: 7529 - DNA, 26 bp, Homo sapiens
acctcgttctgtagctcctttagctt

SEQ ID NO: 7530 - DNA, 26 bp, Homo sapiens
cctcgttctgtagctcctttagcttc

SEQ ID NO: 7531 - DNA, 26 bp, Homo sapiens
ctcgttctgtagctcctttagcttct

SEQ ID NO: 7532 - DNA, 26 bp, Homo sapiens
tcgttctgtagctcctttagcttctc

SEQ ID NO: 7533 - DNA, 26 bp, Homo sapiens
cgttctgtagctcctttagcttctca

SEQ ID NO: 7534 - DNA, 26 bp, Homo sapiens
gttctgtagctcctttagcttctcag

SEQ ID NO: 7535 - DNA, 26 bp, Homo sapiens
ttctgtagctcctttagcttctcagc

SEQ ID NO: 7536 - DNA, 26 bp, Homo sapiens
tctgtagctcctttagcttctcagct

SEQ ID NO: 7537 - DNA, 26 bp, Homo sapiens
ctgtagctcctttagcttctcagctt

SEQ ID NO: 7538 - DNA, 26 bp, Homo sapiens
tgtagctcctttagcttctcagcttc

SEQ ID NO: 7539 - DNA, 26 bp, Homo sapiens
gtagctcctttagcttctcagcttct

SEQ ID NO: 7540 - DNA, 26 bp, Homo sapiens
tagctcctttagcttctcagcttctt

SEQ ID NO: 7541 - DNA, 26 bp, Homo sapiens
agctcctttagcttctcagcttcttc

SEQ ID NO: 7542 - DNA, 26 bp, Homo sapiens
gctcctttagcttctcagcttcttcc

SEQ ID NO: 7543 - DNA, 26 bp, Homo sapiens
ctcctttagcttctcagcttcttcct

SEQ ID NO: 7544 - DNA, 26 bp, Homo sapiens
tcctttagcttctcagcttcttcctc

SEQ ID NO: 7545 - DNA, 26 bp, Homo sapiens
cctttagcttctcagcttcttcctcc

SEQ ID NO: 7546 - DNA, 26 bp, Homo sapiens
ctttagcttctcagcttcttcctcca

SEQ ID NO: 7547 - DNA, 26 bp, Homo sapiens
tttagcttctcagcttcttcctccat

SEQ ID NO: 7548 - DNA, 26 bp, Homo sapiens
ttagcttctcagcttcttcctccatc

SEQ ID NO: 7549 - DNA, 26 bp, Homo sapiens
tagcttctcagcttcttcctccatct

SEQ ID NO: 7550 - DNA, 26 bp, Homo sapiens
agcttctcagcttcttcctccatctc

SEQ ID NO: 7551 - DNA, 26 bp, Homo sapiens
gcttctcagcttcttcctccatctcc

SEQ ID NO: 7552 - DNA, 26 bp, Homo sapiens
cttctcagcttcttcctccatctccc

SEQ ID NO: 7553 - DNA, 26 bp, Homo sapiens
ttctcagcttcttcctccatctccct

SEQ ID NO: 7554 - DNA, 26 bp, Homo sapiens
tctcagcttcttcctccatctccctg

SEQ ID NO: 7555 - DNA, 26 bp, Homo sapiens
ctcagcttcttcctccatctccctga

SEQ ID NO: 7556 - DNA, 26 bp, Homo sapiens
tcagcttcttcctccatctccctgac

SEQ ID NO: 7557 - DNA, 26 bp, Homo sapiens
cagcttcttcctccatctccctgact

SEQ ID NO: 7558 - DNA, 26 bp, Homo sapiens
agcttcttcctccatctccctgactc

SEQ ID NO: 7559 - DNA, 26 bp, Homo sapiens
gcttcttcctccatctccctgactcg

SEQ ID NO: 7560 - DNA, 26 bp, Homo sapiens
cttcttcctccatctccctgactcga

SEQ ID NO: 7561 - DNA, 26 bp, Homo sapiens
ttcttcctccatctccctgactcgag

SEQ ID NO: 7562 - DNA, 26 bp, Homo sapiens
tcttcctccatctccctgactcgagc

SEQ ID NO: 7563 - DNA, 26 bp, Homo sapiens
cttcctccatctccctgactcgagct

SEQ ID NO: 7564 - DNA, 26 bp, Homo sapiens
ttcctccatctccctgactcgagctt

SEQ ID NO: 7565 - DNA, 26 bp, Homo sapiens
tcctccatctccctgactcgagcttt

SEQ ID NO: 7566 - DNA, 26 bp, Homo sapiens
cctccatctccctgactcgagctttg

SEQ ID NO: 7567 - DNA, 26 bp, Homo sapiens
ctccatctccctgactcgagctttga

SEQ ID NO: 7568 - DNA, 26 bp, Homo sapiens
tccatctccctgactcgagctttgat

SEQ ID NO: 7569 - DNA, 26 bp, Homo sapiens
ccatctccctgactcgagctttgata

SEQ ID NO: 7570 - DNA, 26 bp, Homo sapiens
catctccctgactcgagctttgatag

SEQ ID NO: 7571 - DNA, 26 bp, Homo sapiens
atctccctgactcgagctttgatagc

SEQ ID NO: 7572 - DNA, 26 bp, Homo sapiens
tctccctgactcgagctttgatagct

SEQ ID NO: 7573 - DNA, 26 bp, Homo sapiens
ctccctgactcgagctttgatagctt

SEQ ID NO: 7574 - DNA, 26 bp, Homo sapiens
tccctgactcgagctttgatagcttc

SEQ ID NO: 7575 - DNA, 26 bp, Homo sapiens
ccctgactcgagctttgatagcttcc

SEQ ID NO: 7576 - DNA, 26 bp, Homo sapiens
cctgactcgagctttgatagcttcca

SEQ ID NO: 7577 - DNA, 26 bp, Homo sapiens
ctgactcgagctttgatagcttccag

SEQ ID NO: 7578 - DNA, 26 bp, Homo sapiens
tgactcgagctttgatagcttccagc

SEQ ID NO: 7579 - DNA, 26 bp, Homo sapiens
gactcgagctttgatagcttccagct

SEQ ID NO: 7580 - DNA, 26 bp, Homo sapiens
actcgagctttgatagcttccagctc

SEQ ID NO: 7581 - DNA, 26 bp, Homo sapiens
ctcgagctttgatagcttccagctcc

SEQ ID NO: 7582 - DNA, 26 bp, Homo sapiens
tcgagctttgatagcttccagctccg

SEQ ID NO: 7583 - DNA, 26 bp, Homo sapiens
cgagctttgatagcttccagctccgg

SEQ ID NO: 7584 - DNA, 26 bp, Homo sapiens
gagctttgatagcttccagctccggg

SEQ ID NO: 7585 - DNA, 26 bp, Homo sapiens
agctttgatagcttccagctccgggt

SEQ ID NO: 7586 - DNA, 26 bp, Homo sapiens
gctttgatagcttccagctccgggtc

SEQ ID NO: 7587 - DNA, 26 bp, Homo sapiens
ctttgatagcttccagctccgggtcc

SEQ ID NO: 7588 - DNA, 26 bp, Homo sapiens
tttgatagcttccagctccgggtcct

SEQ ID NO: 7589 - DNA, 26 bp, Homo sapiens
ttgatagcttccagctccgggtcctc

SEQ ID NO: 7590 - DNA, 26 bp, Homo sapiens
tgatagcttccagctccgggtcctca

SEQ ID NO: 7591 - DNA, 26 bp, Homo sapiens
gatagcttccagctccgggtcctcaa

SEQ ID NO: 7592 - DNA, 26 bp, Homo sapiens
atagcttccagctccgggtcctcaat

SEQ ID NO: 7593 - DNA, 26 bp, Homo sapiens
tagcttccagctccgggtcctcaatg

SEQ ID NO: 7594 - DNA, 26 bp, Homo sapiens
agcttccagctccgggtcctcaatgg

SEQ ID NO: 7595 - DNA, 26 bp, Homo sapiens
gcttccagctccgggtcctcaatggc

SEQ ID NO: 7596 - DNA, 26 bp, Homo sapiens
cttccagctccgggtcctcaatggcg

SEQ ID NO: 7597 - DNA, 26 bp, Homo sapiens
ttccagctccgggtcctcaatggcgc

SEQ ID NO: 7598 - DNA, 26 bp, Homo sapiens
tccagctccgggtcctcaatggcgcc

SEQ ID NO: 7599 - DNA, 26 bp, Homo sapiens
ccagctccgggtcctcaatggcgccg

SEQ ID NO: 7600 - DNA, 26 bp, Homo sapiens
cagctccgggtcctcaatggcgccgt

SEQ ID NO: 7601 - DNA, 26 bp, Homo sapiens
agctccgggtcctcaatggcgccgtc

SEQ ID NO: 7602 - DNA, 26 bp, Homo sapiens
gctccgggtcctcaatggcgccgtcc

SEQ ID NO: 7603 - DNA, 26 bp, Homo sapiens
ctccgggtcctcaatggcgccgtccc

SEQ ID NO: 7604 - DNA, 26 bp, Homo sapiens
tccgggtcctcaatggcgccgtcccc

SEQ ID NO: 7605 - DNA, 26 bp, Homo sapiens
ccgggtcctcaatggcgccgtccccc

SEQ ID NO: 7606 - DNA, 26 bp, Homo sapiens
cgggtcctcaatggcgccgtcccccg

SEQ ID NO: 7607 - DNA, 26 bp, Homo sapiens
gggtcctcaatggcgccgtcccccgg

SEQ ID NO: 7608 - DNA, 26 bp, Homo sapiens
ggtcctcaatggcgccgtcccccggg

SEQ ID NO: 7609 - DNA, 26 bp, Homo sapiens
gtcctcaatggcgccgtcccccgggt

SEQ ID NO: 7610 - DNA, 26 bp, Homo sapiens
tcctcaatggcgccgtcccccgggtc

SEQ ID NO: 7611 - DNA, 26 bp, Homo sapiens
cctcaatggcgccgtcccccgggtca

SEQ ID NO: 7612 - DNA, 26 bp, Homo sapiens
ctcaatggcgccgtcccccgggtcac

SEQ ID NO: 7613 - DNA, 26 bp, Homo sapiens
tcaatggcgccgtcccccgggtcacc

SEQ ID NO: 7614 - DNA, 26 bp, Homo sapiens
caatggcgccgtcccccgggtcaccc

SEQ ID NO: 7615 - DNA, 26 bp, Homo sapiens
aatggcgccgtcccccgggtcaccct

SEQ ID NO: 7616 - DNA, 26 bp, Homo sapiens
atggcgccgtcccccgggtcaccctc

SEQ ID NO: 7617 - DNA, 26 bp, Homo sapiens
tggcgccgtcccccgggtcaccctcg

SEQ ID NO: 7618 - DNA, 26 bp, Homo sapiens
ggcgccgtcccccgggtcaccctcga

SEQ ID NO: 7619 - DNA, 26 bp, Homo sapiens
gcgccgtcccccgggtcaccctcgac

SEQ ID NO: 7620 - DNA, 26 bp, Homo sapiens
cgccgtcccccgggtcaccctcgacc

SEQ ID NO: 7621 - DNA, 26 bp, Homo sapiens
gccgtcccccgggtcaccctcgacca

SEQ ID NO: 7622 - DNA, 26 bp, Homo sapiens
ccgtcccccgggtcaccctcgaccag

SEQ ID NO: 7623 - DNA, 26 bp, Homo sapiens
cgtcccccgggtcaccctcgaccagt

SEQ ID NO: 7624 - DNA, 26 bp, Homo sapiens
gtcccccgggtcaccctcgaccagtc

SEQ ID NO: 7625 - DNA, 26 bp, Homo sapiens
tcccccgggtcaccctcgaccagtcc

SEQ ID NO: 7626 - DNA, 26 bp, Homo sapiens
cccccgggtcaccctcgaccagtccc

SEQ ID NO: 7627 - DNA, 26 bp, Homo sapiens
ccccgggtcaccctcgaccagtcccg

SEQ ID NO: 7628 - DNA, 26 bp, Homo sapiens
cccgggtcaccctcgaccagtcccgg

SEQ ID NO: 7629 - DNA, 26 bp, Homo sapiens
ccgggtcaccctcgaccagtcccggc

SEQ ID NO: 7630 - DNA, 26 bp, Homo sapiens
cgggtcaccctcgaccagtcccggct

SEQ ID NO: 7631 - DNA, 26 bp, Homo sapiens
gggtcaccctcgaccagtcccggctc

SEQ ID NO: 7632 - DNA, 26 bp, Homo sapiens
ggtcaccctcgaccagtcccggctcc

SEQ ID NO: 7633 - DNA, 26 bp, Homo sapiens
gtcaccctcgaccagtcccggctcct

SEQ ID NO: 7634 - DNA, 26 bp, Homo sapiens
tcaccctcgaccagtcccggctcctc

SEQ ID NO: 7635 - DNA, 26 bp, Homo sapiens
caccctcgaccagtcccggctcctcc

SEQ ID NO: 7636 - DNA, 26 bp, Homo sapiens
accctcgaccagtcccggctcctcct

SEQ ID NO: 7637 - DNA, 26 bp, Homo sapiens
ccctcgaccagtcccggctcctcctc

SEQ ID NO: 7638 - DNA, 26 bp, Homo sapiens
cctcgaccagtcccggctcctcctcc

SEQ ID NO: 7639 - DNA, 26 bp, Homo sapiens
ctcgaccagtcccggctcctcctcct

SEQ ID NO: 7640 - DNA, 26 bp, Homo sapiens
tcgaccagtcccggctcctcctcctc

SEQ ID NO: 7641 - DNA, 26 bp, Homo sapiens
cgaccagtcccggctcctcctcctcc

SEQ ID NO: 7642 - DNA, 26 bp, Homo sapiens
gaccagtcccggctcctcctcctcct

SEQ ID NO: 7643 - DNA, 26 bp, Homo sapiens
accagtcccggctcctcctcctcctc

SEQ ID NO: 7644 - DNA, 26 bp, Homo sapiens
ccagtcccggctcctcctcctcctct

SEQ ID NO: 7645 - DNA, 26 bp, Homo sapiens
cagtcccggctcctcctcctcctctt

SEQ ID NO: 7646 - DNA, 26 bp, Homo sapiens
agtcccggctcctcctcctcctcttg

SEQ ID NO: 7647 - DNA, 26 bp, Homo sapiens
gtcccggctcctcctcctcctcttgg

SEQ ID NO: 7648 - DNA, 26 bp, Homo sapiens
tcccggctcctcctcctcctcttggc

SEQ ID NO: 7649 - DNA, 26 bp, Homo sapiens
cccggctcctcctcctcctcttggct

SEQ ID NO: 7650 - DNA, 26 bp, Homo sapiens
ccggctcctcctcctcctcttggctg

SEQ ID NO: 7651 - DNA, 26 bp, Homo sapiens
cggctcctcctcctcctcttggctgc

SEQ ID NO: 7652 - DNA, 26 bp, Homo sapiens
ggctcctcctcctcctcttggctgcc

SEQ ID NO: 7653 - DNA, 26 bp, Homo sapiens
gctcctcctcctcctcttggctgccg

SEQ ID NO: 7654 - DNA, 26 bp, Homo sapiens
ctcctcctcctcctcttggctgccgg

SEQ ID NO: 7655 - DNA, 26 bp, Homo sapiens
tcctcctcctcctcttggctgccggg

SEQ ID NO: 7656 - DNA, 26 bp, Homo sapiens
cctcctcctcctcttggctgccgggg

SEQ ID NO: 7657 - DNA, 26 bp, Homo sapiens
ctcctcctcctcttggctgccggggg

SEQ ID NO: 7658 - DNA, 26 bp, Homo sapiens
tcctcctcctcttggctgccgggggc

SEQ ID NO: 7659 - DNA, 26 bp, Homo sapiens
cctcctcctcttggctgccgggggct

SEQ ID NO: 7660 - DNA, 26 bp, Homo sapiens
ctcctcctcttggctgccgggggctc

SEQ ID NO: 7661 - DNA, 26 bp, Homo sapiens
tcctcctcttggctgccgggggctcc

SEQ ID NO: 7662 - DNA, 26 bp, Homo sapiens
cctcctcttggctgccgggggctccc

SEQ ID NO: 7663 - DNA, 26 bp, Homo sapiens
ctcctcttggctgccgggggctcccg

SEQ ID NO: 7664 - DNA, 26 bp, Homo sapiens
tcctcttggctgccgggggctcccga

SEQ ID NO: 7665 - DNA, 26 bp, Homo sapiens
cctcttggctgccgggggctcccgaa

SEQ ID NO: 7666 - DNA, 26 bp, Homo sapiens
ctcttggctgccgggggctcccgaac

SEQ ID NO: 7667 - DNA, 26 bp, Homo sapiens
tcttggctgccgggggctcccgaacc

SEQ ID NO: 7668 - DNA, 26 bp, Homo sapiens
cttggctgccgggggctcccgaacca

SEQ ID NO: 7669 - DNA, 26 bp, Homo sapiens
ttggctgccgggggctcccgaaccag

SEQ ID NO: 7670 - DNA, 26 bp, Homo sapiens
tggctgccgggggctcccgaaccagg

SEQ ID NO: 7671 - DNA, 26 bp, Homo sapiens
ggctgccgggggctcccgaaccaggc

SEQ ID NO: 7672 - DNA, 26 bp, Homo sapiens
gctgccgggggctcccgaaccaggcc

SEQ ID NO: 7673 - DNA, 26 bp, Homo sapiens
ctgccgggggctcccgaaccaggccc

SEQ ID NO: 7674 - DNA, 26 bp, Homo sapiens
tgccgggggctcccgaaccaggccca

SEQ ID NO: 7675 - DNA, 26 bp, Homo sapiens
gccgggggctcccgaaccaggcccag

SEQ ID NO: 7676 - DNA, 26 bp, Homo sapiens
ccgggggctcccgaaccaggcccagg

SEQ ID NO: 7677 - DNA, 26 bp, Homo sapiens
cgggggctcccgaaccaggcccaggg

SEQ ID NO: 7678 - DNA, 26 bp, Homo sapiens
gggggctcccgaaccaggcccagggc

SEQ ID NO: 7679 - DNA, 26 bp, Homo sapiens
ggggctcccgaaccaggcccagggcc

SEQ ID NO: 7680 - DNA, 26 bp, Homo sapiens
gggctcccgaaccaggcccagggccc

SEQ ID NO: 7681 - DNA, 26 bp, Homo sapiens
ggctcccgaaccaggcccagggcccg

SEQ ID NO: 7682 - DNA, 26 bp, Homo sapiens
gctcccgaaccaggcccagggcccgg

SEQ ID NO: 7683 - DNA, 26 bp, Homo sapiens
ctcccgaaccaggcccagggcccgga

SEQ ID NO: 7684 - DNA, 26 bp, Homo sapiens
tcccgaaccaggcccagggcccggag

SEQ ID NO: 7685 - DNA, 26 bp, Homo sapiens
cccgaaccaggcccagggcccggagc

SEQ ID NO: 7686 - DNA, 26 bp, Homo sapiens
ccgaaccaggcccagggcccggagct

SEQ ID NO: 7687 - DNA, 26 bp, Homo sapiens
cgaaccaggcccagggcccggagctc

SEQ ID NO: 7688 - DNA, 26 bp, Homo sapiens
gaaccaggcccagggcccggagctcc

SEQ ID NO: 7689 - DNA, 26 bp, Homo sapiens
aaccaggcccagggcccggagctccc

SEQ ID NO: 7690 - DNA, 26 bp, Homo sapiens
accaggcccagggcccggagctcccg

SEQ ID NO: 7691 - DNA, 26 bp, Homo sapiens
ccaggcccagggcccggagctcccgg

SEQ ID NO: 7692 - DNA, 26 bp, Homo sapiens
caggcccagggcccggagctcccggg

SEQ ID NO: 7693 - DNA, 26 bp, Homo sapiens
aggcccagggcccggagctcccgggg

SEQ ID NO: 7694 - DNA, 26 bp, Homo sapiens
ggcccagggcccggagctcccggggg

SEQ ID NO: 7695 - DNA, 26 bp, Homo sapiens
gcccagggcccggagctcccgggggg

SEQ ID NO: 7696 - DNA, 26 bp, Homo sapiens
cccagggcccggagctcccggggggg

SEQ ID NO: 7697 - DNA, 26 bp, Homo sapiens
ccagggcccggagctcccgggggggc

SEQ ID NO: 7698 - DNA, 26 bp, Homo sapiens
cagggcccggagctcccgggggggcg

SEQ ID NO: 7699 - DNA, 26 bp, Homo sapiens
agggcccggagctcccgggggggcgc

SEQ ID NO: 7700 - DNA, 26 bp, Homo sapiens
gggcccggagctcccgggggggcgcg

SEQ ID NO: 7701 - DNA, 26 bp, Homo sapiens
ggcccggagctcccgggggggcgcgg

SEQ ID NO: 7702 - DNA, 26 bp, Homo sapiens
gcccggagctcccgggggggcgcggg

SEQ ID NO: 7703 - DNA, 26 bp, Homo sapiens
cccggagctcccgggggggcgcgggg

SEQ ID NO: 7704 - DNA, 26 bp, Homo sapiens
ccggagctcccgggggggcgcggggc

SEQ ID NO: 7705 - DNA, 26 bp, Homo sapiens
cggagctcccgggggggcgcggggcc

SEQ ID NO: 7706 - DNA, 26 bp, Homo sapiens
ggagctcccgggggggcgcggggccg

SEQ ID NO: 7707 - DNA, 26 bp, Homo sapiens
gagctcccgggggggcgcggggccgg

SEQ ID NO: 7708 - DNA, 26 bp, Homo sapiens
agctcccgggggggcgcggggccggg

SEQ ID NO: 7709 - DNA, 26 bp, Homo sapiens
gctcccgggggggcgcggggccgggg

SEQ ID NO: 7710 - DNA, 26 bp, Homo sapiens
ctcccgggggggcgcggggccggggc

SEQ ID NO: 7711 - DNA, 26 bp, Homo sapiens
tcccgggggggcgcggggccggggcg

SEQ ID NO: 7712 - DNA, 26 bp, Homo sapiens
cccgggggggcgcggggccggggcgg

SEQ ID NO: 7713 - DNA, 26 bp, Homo sapiens
ccgggggggcgcggggccggggcggc

SEQ ID NO: 7714 - DNA, 26 bp, Homo sapiens
cgggggggcgcggggccggggcggct

SEQ ID NO: 7715 - DNA, 26 bp, Homo sapiens
gggggggcgcggggccggggcggctc

SEQ ID NO: 7716 - DNA, 26 bp, Homo sapiens
ggggggcgcggggccggggcggctcc

SEQ ID NO: 7717 - DNA, 26 bp, Homo sapiens
gggggcgcggggccggggcggctcct

SEQ ID NO: 7718 - DNA, 26 bp, Homo sapiens
ggggcgcggggccggggcggctcctc

SEQ ID NO: 7719 - DNA, 26 bp, Homo sapiens
gggcgcggggccggggcggctcctct

SEQ ID NO: 7720 - DNA, 26 bp, Homo sapiens
ggcgcggggccggggcggctcctctt

SEQ ID NO: 7721 - DNA, 26 bp, Homo sapiens
gcgcggggccggggcggctcctcttc

SEQ ID NO: 7722 - DNA, 26 bp, Homo sapiens
cgcggggccggggcggctcctcttcg

SEQ ID NO: 7723 - DNA, 26 bp, Homo sapiens
gcggggccggggcggctcctcttcgg

SEQ ID NO: 7724 - DNA, 26 bp, Homo sapiens
cggggccggggcggctcctcttcggg

SEQ ID NO: 7725 - DNA, 26 bp, Homo sapiens
ggggccggggcggctcctcttcgggc

SEQ ID NO: 7726 - DNA, 26 bp, Homo sapiens
gggccggggcggctcctcttcgggct

SEQ ID NO: 7727 - DNA, 26 bp, Homo sapiens
ggccggggcggctcctcttcgggctc

SEQ ID NO: 7728 - DNA, 26 bp, Homo sapiens
gccggggcggctcctcttcgggctcg

SEQ ID NO: 7729 - DNA, 26 bp, Homo sapiens
ccggggcggctcctcttcgggctcgg

SEQ ID NO: 7730 - DNA, 26 bp, Homo sapiens
cggggcggctcctcttcgggctcggg

SEQ ID NO: 7731 - DNA, 26 bp, Homo sapiens
ggggcggctcctcttcgggctcgggc

SEQ ID NO: 7732 - DNA, 26 bp, Homo sapiens
gggcggctcctcttcgggctcgggct

SEQ ID NO: 7733 - DNA, 26 bp, Homo sapiens
ggcggctcctcttcgggctcgggctc

SEQ ID NO: 7734 - DNA, 26 bp, Homo sapiens
gcggctcctcttcgggctcgggctcc

SEQ ID NO: 7735 - DNA, 26 bp, Homo sapiens
cggctcctcttcgggctcgggctccg

SEQ ID NO: 7736 - DNA, 26 bp, Homo sapiens
ggctcctcttcgggctcgggctccgg

SEQ ID NO: 7737 - DNA, 26 bp, Homo sapiens
gctcctcttcgggctcgggctccggc

SEQ ID NO: 7738 - DNA, 26 bp, Homo sapiens
ctcctcttcgggctcgggctccggct

SEQ ID NO: 7739 - DNA, 26 bp, Homo sapiens
tcctcttcgggctcgggctccggctc

SEQ ID NO: 7740 - DNA, 26 bp, Homo sapiens
cctcttcgggctcgggctccggctcg

SEQ ID NO: 7741 - DNA, 26 bp, Homo sapiens
ctcttcgggctcgggctccggctcgg

SEQ ID NO: 7742 - DNA, 26 bp, Homo sapiens
tcttcgggctcgggctccggctcggg

SEQ ID NO: 7743 - DNA, 26 bp, Homo sapiens
cttcgggctcgggctccggctcgggc

SEQ ID NO: 7744 - DNA, 26 bp, Homo sapiens
ttcgggctcgggctccggctcgggct

SEQ ID NO: 7745 - DNA, 26 bp, Homo sapiens
tcgggctcgggctccggctcgggctc

SEQ ID NO: 7746 - DNA, 26 bp, Homo sapiens
cgggctcgggctccggctcgggctcc

SEQ ID NO: 7747 - DNA, 26 bp, Homo sapiens
gggctcgggctccggctcgggctcca

SEQ ID NO: 7748 - DNA, 26 bp, Homo sapiens
ggctcgggctccggctcgggctccag

SEQ ID NO: 7749 - DNA, 26 bp, Homo sapiens
gctcgggctccggctcgggctccagc

SEQ ID NO: 7750 - DNA, 26 bp, Homo sapiens
ctcgggctccggctcgggctccagca

SEQ ID NO: 7751 - DNA, 26 bp, Homo sapiens
tcgggctccggctcgggctccagcag

SEQ ID NO: 7752 - DNA, 26 bp, Homo sapiens
cgggctccggctcgggctccagcagc

SEQ ID NO: 7753 - DNA, 26 bp, Homo sapiens
gggctccggctcgggctccagcagca

SEQ ID NO: 7754 - DNA, 26 bp, Homo sapiens
ggctccggctcgggctccagcagcag

SEQ ID NO: 7755 - DNA, 26 bp, Homo sapiens
gctccggctcgggctccagcagcagc

SEQ ID NO: 7756 - DNA, 26 bp, Homo sapiens
ctccggctcgggctccagcagcagct

SEQ ID NO: 7757 - DNA, 26 bp, Homo sapiens
tccggctcgggctccagcagcagctc

SEQ ID NO: 7758 - DNA, 26 bp, Homo sapiens
ccggctcgggctccagcagcagctcc

SEQ ID NO: 7759 - DNA, 26 bp, Homo sapiens
cggctcgggctccagcagcagctcct

SEQ ID NO: 7760 - DNA, 26 bp, Homo sapiens
ggctcgggctccagcagcagctcctc

SEQ ID NO: 7761 - DNA, 26 bp, Homo sapiens
gctcgggctccagcagcagctcctca

SEQ ID NO: 7762 - DNA, 26 bp, Homo sapiens
ctcgggctccagcagcagctcctcag

SEQ ID NO: 7763 - DNA, 26 bp, Homo sapiens
tcgggctccagcagcagctcctcagg

SEQ ID NO: 7764 - DNA, 26 bp, Homo sapiens
cgggctccagcagcagctcctcaggc

SEQ ID NO: 7765 - DNA, 26 bp, Homo sapiens
gggctccagcagcagctcctcaggct

SEQ ID NO: 7766 - DNA, 26 bp, Homo sapiens
ggctccagcagcagctcctcaggctc

SEQ ID NO: 7767 - DNA, 26 bp, Homo sapiens
gctccagcagcagctcctcaggctcc

SEQ ID NO: 7768 - DNA, 26 bp, Homo sapiens
ctccagcagcagctcctcaggctcca

SEQ ID NO: 7769 - DNA, 26 bp, Homo sapiens
tccagcagcagctcctcaggctccag

SEQ ID NO: 7770 - DNA, 26 bp, Homo sapiens
ccagcagcagctcctcaggctccagt

SEQ ID NO: 7771 - DNA, 26 bp, Homo sapiens
cagcagcagctcctcaggctccagtt

SEQ ID NO: 7772 - DNA, 26 bp, Homo sapiens
agcagcagctcctcaggctccagttc

SEQ ID NO: 7773 - DNA, 26 bp, Homo sapiens
gcagcagctcctcaggctccagttcc

SEQ ID NO: 7774 - DNA, 26 bp, Homo sapiens
cagcagctcctcaggctccagttcct

SEQ ID NO: 7775 - DNA, 26 bp, Homo sapiens
agcagctcctcaggctccagttcctc

SEQ ID NO: 7776 - DNA, 26 bp, Homo sapiens
gcagctcctcaggctccagttcctca

SEQ ID NO: 7777 - DNA, 26 bp, Homo sapiens
cagctcctcaggctccagttcctcag

SEQ ID NO: 7778 - DNA, 26 bp, Homo sapiens
agctcctcaggctccagttcctcaga

SEQ ID NO: 7779 - DNA, 26 bp, Homo sapiens
gctcctcaggctccagttcctcagac

SEQ ID NO: 7780 - DNA, 26 bp, Homo sapiens
ctcctcaggctccagttcctcagact

SEQ ID NO: 7781 - DNA, 26 bp, Homo sapiens
tcctcaggctccagttcctcagactc

SEQ ID NO: 7782 - DNA, 26 bp, Homo sapiens
cctcaggctccagttcctcagactcc

SEQ ID NO: 7783 - DNA, 26 bp, Homo sapiens
ctcaggctccagttcctcagactcca

SEQ ID NO: 7784 - DNA, 26 bp, Homo sapiens
tcaggctccagttcctcagactccag

SEQ ID NO: 7785 - DNA, 26 bp, Homo sapiens
caggctccagttcctcagactccagg

SEQ ID NO: 7786 - DNA, 26 bp, Homo sapiens
aggctccagttcctcagactccaggc

SEQ ID NO: 7787 - DNA, 26 bp, Homo sapiens
ggctccagttcctcagactccaggcc

SEQ ID NO: 7788 - DNA, 26 bp, Homo sapiens
gctccagttcctcagactccaggccg

SEQ ID NO: 7789 - DNA, 26 bp, Homo sapiens
ctccagttcctcagactccaggccgt

SEQ ID NO: 7790 - DNA, 26 bp, Homo sapiens
tccagttcctcagactccaggccgtt

SEQ ID NO: 7791 - DNA, 26 bp, Homo sapiens
ccagttcctcagactccaggccgttc

SEQ ID NO: 7792 - DNA, 26 bp, Homo sapiens
cagttcctcagactccaggccgttcc

SEQ ID NO: 7793 - DNA, 26 bp, Homo sapiens
agttcctcagactccaggccgttccc

SEQ ID NO: 7794 - DNA, 26 bp, Homo sapiens
gttcctcagactccaggccgttcccg

SEQ ID NO: 7795 - DNA, 26 bp, Homo sapiens
ttcctcagactccaggccgttcccgt

SEQ ID NO: 7796 - DNA, 26 bp, Homo sapiens
tcctcagactccaggccgttcccgta

SEQ ID NO: 7797 - DNA, 26 bp, Homo sapiens
cctcagactccaggccgttcccgtag

SEQ ID NO: 7798 - DNA, 26 bp, Homo sapiens
ctcagactccaggccgttcccgtagt

SEQ ID NO: 7799 - DNA, 26 bp, Homo sapiens
tcagactccaggccgttcccgtagtc

SEQ ID NO: 7800 - DNA, 26 bp, Homo sapiens
cagactccaggccgttcccgtagtcc

SEQ ID NO: 7801 - DNA, 26 bp, Homo sapiens
agactccaggccgttcccgtagtccc

SEQ ID NO: 7802 - DNA, 26 bp, Homo sapiens
gactccaggccgttcccgtagtcccc

SEQ ID NO: 7803 - DNA, 26 bp, Homo sapiens
actccaggccgttcccgtagtcccct

SEQ ID NO: 7804 - DNA, 26 bp, Homo sapiens
ctccaggccgttcccgtagtcccctg

SEQ ID NO: 7805 - DNA, 26 bp, Homo sapiens
tccaggccgttcccgtagtcccctgc

SEQ ID NO: 7806 - DNA, 26 bp, Homo sapiens
ccaggccgttcccgtagtcccctgcg

SEQ ID NO: 7807 - DNA, 26 bp, Homo sapiens
caggccgttcccgtagtcccctgcgc

SEQ ID NO: 7808 - DNA, 26 bp, Homo sapiens
aggccgttcccgtagtcccctgcgcc

SEQ ID NO: 7809 - DNA, 26 bp, Homo sapiens
ggccgttcccgtagtcccctgcgccc

SEQ ID NO: 7810 - DNA, 26 bp, Homo sapiens
gccgttcccgtagtcccctgcgcccc

SEQ ID NO: 7811 - DNA, 26 bp, Homo sapiens
ccgttcccgtagtcccctgcgccccc

SEQ ID NO: 7812 - DNA, 26 bp, Homo sapiens
cgttcccgtagtcccctgcgcccccc

SEQ ID NO: 7813 - DNA, 26 bp, Homo sapiens
gttcccgtagtcccctgcgccccccg

SEQ ID NO: 7814 - DNA, 26 bp, Homo sapiens
ttcccgtagtcccctgcgccccccgg

SEQ ID NO: 7815 - DNA, 26 bp, Homo sapiens
tcccgtagtcccctgcgccccccggg

SEQ ID NO: 7816 - DNA, 26 bp, Homo sapiens
cccgtagtcccctgcgccccccgggg

SEQ ID NO: 7817 - DNA, 26 bp, Homo sapiens
ccgtagtcccctgcgccccccggggc

SEQ ID NO: 7818 - DNA, 26 bp, Homo sapiens
cgtagtcccctgcgccccccggggcc

SEQ ID NO: 7819 - DNA, 26 bp, Homo sapiens
gtagtcccctgcgccccccggggccc

SEQ ID NO: 7820 - DNA, 26 bp, Homo sapiens
tagtcccctgcgccccccggggcccc

SEQ ID NO: 7821 - DNA, 26 bp, Homo sapiens
agtcccctgcgccccccggggccccc

SEQ ID NO: 7822 - DNA, 26 bp, Homo sapiens
gtcccctgcgccccccggggccccct

SEQ ID NO: 7823 - DNA, 26 bp, Homo sapiens
tcccctgcgccccccggggccccctc

SEQ ID NO: 7824 - DNA, 26 bp, Homo sapiens
cccctgcgccccccggggccccctcc

SEQ ID NO: 7825 - DNA, 26 bp, Homo sapiens
ccctgcgccccccggggccccctccc

SEQ ID NO: 7826 - DNA, 26 bp, Homo sapiens
cctgcgccccccggggccccctcccc

SEQ ID NO: 7827 - DNA, 26 bp, Homo sapiens
ctgcgccccccggggccccctccccg

SEQ ID NO: 7828 - DNA, 26 bp, Homo sapiens
tgcgccccccggggccccctccccgg

SEQ ID NO: 7829 - DNA, 26 bp, Homo sapiens
gcgccccccggggccccctccccggc

SEQ ID NO: 7830 - DNA, 26 bp, Homo sapiens
cgccccccggggccccctccccggcc

SEQ ID NO: 7831 - DNA, 26 bp, Homo sapiens
gccccccggggccccctccccggcct

SEQ ID NO: 7832 - DNA, 26 bp, Homo sapiens
ccccccggggccccctccccggcctc

SEQ ID NO: 7833 - DNA, 26 bp, Homo sapiens
cccccggggccccctccccggcctcc

SEQ ID NO: 7834 - DNA, 26 bp, Homo sapiens
ccccggggccccctccccggcctccc

SEQ ID NO: 7835 - DNA, 26 bp, Homo sapiens
cccggggccccctccccggcctcccc

SEQ ID NO: 7836 - DNA, 26 bp, Homo sapiens
ccggggccccctccccggcctcccca

SEQ ID NO: 7837 - DNA, 26 bp, Homo sapiens
cggggccccctccccggcctccccac

SEQ ID NO: 7838 - DNA, 26 bp, Homo sapiens
ggggccccctccccggcctccccacc

SEQ ID NO: 7839 - DNA, 26 bp, Homo sapiens
gggccccctccccggcctccccaccg

SEQ ID NO: 7840 - DNA, 26 bp, Homo sapiens
ggccccctccccggcctccccaccgg

SEQ ID NO: 7841 - DNA, 26 bp, Homo sapiens
gccccctccccggcctccccaccggc

SEQ ID NO: 7842 - DNA, 26 bp, Homo sapiens
ccccctccccggcctccccaccggcc

SEQ ID NO: 7843 - DNA, 26 bp, Homo sapiens
cccctccccggcctccccaccggccc

SEQ ID NO: 7844 - DNA, 26 bp, Homo sapiens
ccctccccggcctccccaccggcccc

SEQ ID NO: 7845 - DNA, 26 bp, Homo sapiens
cctccccggcctccccaccggccccg

SEQ ID NO: 7846 - DNA, 26 bp, Homo sapiens
ctccccggcctccccaccggccccgg

SEQ ID NO: 7847 - DNA, 26 bp, Homo sapiens
tccccggcctccccaccggccccggg

SEQ ID NO: 7848 - DNA, 26 bp, Homo sapiens
ccccggcctccccaccggccccgggc

SEQ ID NO: 7849 - DNA, 26 bp, Homo sapiens
cccggcctccccaccggccccgggca

SEQ ID NO: 7850 - DNA, 26 bp, Homo sapiens
ccggcctccccaccggccccgggcac

SEQ ID NO: 7851 - DNA, 26 bp, Homo sapiens
cggcctccccaccggccccgggcaca

SEQ ID NO: 7852 - DNA, 26 bp, Homo sapiens
ggcctccccaccggccccgggcacaa

SEQ ID NO: 7853 - DNA, 26 bp, Homo sapiens
gcctccccaccggccccgggcacaag

SEQ ID NO: 7854 - DNA, 26 bp, Homo sapiens
cctccccaccggccccgggcacaaga

SEQ ID NO: 7855 - DNA, 26 bp, Homo sapiens
ctccccaccggccccgggcacaagat

SEQ ID NO: 7856 - DNA, 26 bp, Homo sapiens
tccccaccggccccgggcacaagatg

SEQ ID NO: 7857 - DNA, 26 bp, Homo sapiens
ccccaccggccccgggcacaagatgg

SEQ ID NO: 7858 - DNA, 26 bp, Homo sapiens
cccaccggccccgggcacaagatggc

SEQ ID NO: 7859 - DNA, 26 bp, Homo sapiens
ccaccggccccgggcacaagatggcg

SEQ ID NO: 7860 - DNA, 26 bp, Homo sapiens
caccggccccgggcacaagatggcgc

SEQ ID NO: 7861 - DNA, 26 bp, Homo sapiens
accggccccgggcacaagatggcgcc

SEQ ID NO: 7862 - DNA, 26 bp, Homo sapiens
ccggccccgggcacaagatggcgccg

SEQ ID NO: 7863 - DNA, 26 bp, Homo sapiens
cggccccgggcacaagatggcgccgc

SEQ ID NO: 7864 - DNA, 26 bp, Homo sapiens
ggccccgggcacaagatggcgccgcc

SEQ ID NO: 7865 - DNA, 26 bp, Homo sapiens
gccccgggcacaagatggcgccgccg

SEQ ID NO: 7866 - DNA, 26 bp, Homo sapiens
ccccgggcacaagatggcgccgccgc

SEQ ID NO: 7867 - DNA, 26 bp, Homo sapiens
cccgggcacaagatggcgccgccgcc

SEQ ID NO: 7868 - DNA, 26 bp, Homo sapiens
ccgggcacaagatggcgccgccgccc

SEQ ID NO: 7869 - DNA, 26 bp, Homo sapiens
cgggcacaagatggcgccgccgcccc

SEQ ID NO: 7870 - DNA, 26 bp, Homo sapiens
gggcacaagatggcgccgccgccccg

SEQ ID NO: 7871 - DNA, 26 bp, Homo sapiens
ggcacaagatggcgccgccgccccgg

SEQ ID NO: 7872 - DNA, 26 bp, Homo sapiens
gcacaagatggcgccgccgccccggc

SEQ ID NO: 7873 - DNA, 26 bp, Homo sapiens
cacaagatggcgccgccgccccggcc

SEQ ID NO: 7874 - DNA, 26 bp, Homo sapiens
acaagatggcgccgccgccccggccc

SEQ ID NO: 7875 - DNA, 26 bp, Homo sapiens
caagatggcgccgccgccccggcccg

SEQ ID NO: 7876 - DNA, 26 bp, Homo sapiens
aagatggcgccgccgccccggcccgg

SEQ ID NO: 7877 - DNA, 26 bp, Homo sapiens
agatggcgccgccgccccggcccgga

SEQ ID NO: 7878 - DNA, 26 bp, Homo sapiens
gatggcgccgccgccccggcccggag

SEQ ID NO: 7879 - DNA, 26 bp, Homo sapiens
atggcgccgccgccccggcccggagc

SEQ ID NO: 7880 - DNA, 26 bp, Homo sapiens
tggcgccgccgccccggcccggagcc

SEQ ID NO: 7881 - DNA, 26 bp, Homo sapiens
ggcgccgccgccccggcccggagccc

SEQ ID NO: 7882 - DNA, 26 bp, Homo sapiens
gcgccgccgccccggcccggagcccc

SEQ ID NO: 7883 - DNA, 26 bp, Homo sapiens
cgccgccgccccggcccggagccccg

SEQ ID NO: 7884 - DNA, 26 bp, Homo sapiens
gccgccgccccggcccggagccccga

SEQ ID NO: 7885 - DNA, 26 bp, Homo sapiens
ccgccgccccggcccggagccccgac

SEQ ID NO: 7886 - DNA, 26 bp, Homo sapiens
cgccgccccggcccggagccccgacc

SEQ ID NO: 7887 - DNA, 26 bp, Homo sapiens
gccgccccggcccggagccccgaccg

SEQ ID NO: 7888 - DNA, 26 bp, Homo sapiens
ccgccccggcccggagccccgaccgc

SEQ ID NO: 7889 - DNA, 26 bp, Homo sapiens
cgccccggcccggagccccgaccgcc

SEQ ID NO: 7890 - DNA, 26 bp, Homo sapiens
gccccggcccggagccccgaccgccc

SEQ ID NO: 7891 - DNA, 26 bp, Homo sapiens
ccccggcccggagccccgaccgcccg

SEQ ID NO: 7892 - DNA, 26 bp, Homo sapiens
cccggcccggagccccgaccgcccgc

SEQ ID NO: 7893 - DNA, 26 bp, Homo sapiens
ccggcccggagccccgaccgcccgca

SEQ ID NO: 7894 - DNA, 26 bp, Homo sapiens
cggcccggagccccgaccgcccgcag

SEQ ID NO: 7895 - DNA, 26 bp, Homo sapiens
ggcccggagccccgaccgcccgcagc

SEQ ID NO: 7896 - DNA, 26 bp, Homo sapiens
gcccggagccccgaccgcccgcagcc

SEQ ID NO: 7897 - DNA, 26 bp, Homo sapiens
cccggagccccgaccgcccgcagccc

SEQ ID NO: 7898 - DNA, 26 bp, Homo sapiens
ccggagccccgaccgcccgcagcccc

SEQ ID NO: 7899 - DNA, 26 bp, Homo sapiens
cggagccccgaccgcccgcagccccc

SEQ ID NO: 7900 - DNA, 26 bp, Homo sapiens
ggagccccgaccgcccgcagcccccg

SEQ ID NO: 7901 - DNA, 26 bp, Homo sapiens
gagccccgaccgcccgcagcccccgc

SEQ ID NO: 7902 - DNA, 26 bp, Homo sapiens
agccccgaccgcccgcagcccccgct

SEQ ID NO: 7903 - DNA, 26 bp, Homo sapiens
gccccgaccgcccgcagcccccgctg

SEQ ID NO: 7904 - DNA, 26 bp, Homo sapiens
ccccgaccgcccgcagcccccgctgc

SEQ ID NO: 7905 - DNA, 26 bp, Homo sapiens
cccgaccgcccgcagcccccgctgct

SEQ ID NO: 7906 - DNA, 26 bp, Homo sapiens
ccgaccgcccgcagcccccgctgctg

SEQ ID NO: 7907 - DNA, 26 bp, Homo sapiens
cgaccgcccgcagcccccgctgctgc

SEQ ID NO: 7908 - DNA, 26 bp, Homo sapiens
gaccgcccgcagcccccgctgctgct

SEQ ID NO: 7909 - DNA, 26 bp, Homo sapiens
accgcccgcagcccccgctgctgctg

SEQ ID NO: 7910 - DNA, 26 bp, Homo sapiens
ccgcccgcagcccccgctgctgctgc

SEQ ID NO: 7911 - DNA, 26 bp, Homo sapiens
cgcccgcagcccccgctgctgctgcc

SEQ ID NO: 7912 - DNA, 26 bp, Homo sapiens
gcccgcagcccccgctgctgctgccg

SEQ ID NO: 7913 - DNA, 26 bp, Homo sapiens
cccgcagcccccgctgctgctgccgc

SEQ ID NO: 7914 - DNA, 26 bp, Homo sapiens
ccgcagcccccgctgctgctgccgcc

SEQ ID NO: 7915 - DNA, 26 bp, Homo sapiens
cgcagcccccgctgctgctgccgccg

SEQ ID NO: 7916 - DNA, 26 bp, Homo sapiens
gcagcccccgctgctgctgccgccgc

SEQ ID NO: 7917 - DNA, 26 bp, Homo sapiens
cagcccccgctgctgctgccgccgcc

SEQ ID NO: 7918 - DNA, 26 bp, Homo sapiens
agcccccgctgctgctgccgccgccg

SEQ ID NO: 7919 - DNA, 26 bp, Homo sapiens
gcccccgctgctgctgccgccgccgc

SEQ ID NO: 7920 - DNA, 26 bp, Homo sapiens
cccccgctgctgctgccgccgccgcc

SEQ ID NO: 7921 - DNA, 26 bp, Homo sapiens
ccccgctgctgctgccgccgccgccg

SEQ ID NO: 7922 - DNA, 26 bp, Homo sapiens
cccgctgctgctgccgccgccgccgc

SEQ ID NO: 7923 - DNA, 26 bp, Homo sapiens
ccgctgctgctgccgccgccgccgcc

SEQ ID NO: 7924 - DNA, 26 bp, Homo sapiens
cgctgctgctgccgccgccgccgccg

SEQ ID NO: 7925 - DNA, 26 bp, Homo sapiens
gctgctgctgccgccgccgccgccgc

SEQ ID NO: 7926 - DNA, 26 bp, Homo sapiens
ctgctgctgccgccgccgccgccgcc

SEQ ID NO: 7927 - DNA, 26 bp, Homo sapiens
tgctgctgccgccgccgccgccgccg

SEQ ID NO: 7928 - DNA, 26 bp, Homo sapiens
gctgctgccgccgccgccgccgccgc

SEQ ID NO: 7929 - DNA, 26 bp, Homo sapiens
ctgctgccgccgccgccgccgccgcc

SEQ ID NO: 7930 - DNA, 26 bp, Homo sapiens
tgctgccgccgccgccgccgccgcca

SEQ ID NO: 7931 - DNA, 26 bp, Homo sapiens
gctgccgccgccgccgccgccgccat

SEQ ID NO: 7932 - DNA, 26 bp, Homo sapiens
ctgccgccgccgccgccgccgccatc

SEQ ID NO: 7933 - DNA, 26 bp, Homo sapiens
tgccgccgccgccgccgccgccatcg

SEQ ID NO: 7934 - DNA, 26 bp, Homo sapiens
gccgccgccgccgccgccgccatcgc

SEQ ID NO: 7935 - DNA, 26 bp, Homo sapiens
ccgccgccgccgccgccgccatcgcc

SEQ ID NO: 7936 - DNA, 26 bp, Homo sapiens
cgccgccgccgccgccgccatcgccg

SEQ ID NO: 7937 - DNA, 26 bp, Homo sapiens
gccgccgccgccgccgccatcgccgc

SEQ ID NO: 7938 - DNA, 26 bp, Homo sapiens
ccgccgccgccgccgccatcgccgct

SEQ ID NO: 7939 - DNA, 26 bp, Homo sapiens
cgccgccgccgccgccatcgccgctc

SEQ ID NO: 7940 - DNA, 26 bp, Homo sapiens
gccgccgccgccgccatcgccgctca

SEQ ID NO: 7941 - DNA, 26 bp, Homo sapiens
ccgccgccgccgccatcgccgctcag

SEQ ID NO: 7942 - DNA, 26 bp, Homo sapiens
cgccgccgccgccatcgccgctcaga

SEQ ID NO: 7943 - DNA, 26 bp, Homo sapiens
gccgccgccgccatcgccgctcagac

SEQ ID NO: 7944 - DNA, 26 bp, Homo sapiens
ccgccgccgccatcgccgctcagact

SEQ ID NO: 7945 - DNA, 26 bp, Homo sapiens
cgccgccgccatcgccgctcagactg

SEQ ID NO: 7946 - DNA, 26 bp, Homo sapiens
gccgccgccatcgccgctcagactgg

SEQ ID NO: 7947 - DNA, 26 bp, Homo sapiens
ccgccgccatcgccgctcagactggg

SEQ ID NO: 7948 - DNA, 26 bp, Homo sapiens
cgccgccatcgccgctcagactgggg

SEQ ID NO: 7949 - DNA, 26 bp, Homo sapiens
gccgccatcgccgctcagactggggc

SEQ ID NO: 7950 - DNA, 26 bp, Homo sapiens
ccgccatcgccgctcagactggggcc

SEQ ID NO: 7951 - DNA, 26 bp, Homo sapiens
cgccatcgccgctcagactggggccc

SEQ ID NO: 7952 - DNA, 26 bp, Homo sapiens
gccatcgccgctcagactggggcccg

SEQ ID NO: 7953 - DNA, 26 bp, Homo sapiens
ccatcgccgctcagactggggcccgc

SEQ ID NO: 7954 - DNA, 26 bp, Homo sapiens
catcgccgctcagactggggcccgcc

SEQ ID NO: 7955 - DNA, 26 bp, Homo sapiens
atcgccgctcagactggggcccgccg

SEQ ID NO: 7956 - DNA, 26 bp, Homo sapiens
tcgccgctcagactggggcccgccgc

SEQ ID NO: 7957 - DNA, 26 bp, Homo sapiens
cgccgctcagactggggcccgccgcc

SEQ ID NO: 7958 - DNA, 26 bp, Homo sapiens
gccgctcagactggggcccgccgccc

SEQ ID NO: 7959 - DNA, 26 bp, Homo sapiens
ccgctcagactggggcccgccgcccg

SEQ ID NO: 7960 - DNA, 26 bp, Homo sapiens
cgctcagactggggcccgccgcccgg

SEQ ID NO: 7961 - DNA, 26 bp, Homo sapiens
gctcagactggggcccgccgcccggc

SEQ ID NO: 7962 - DNA, 26 bp, Homo sapiens
ctcagactggggcccgccgcccggcg

SEQ ID NO: 7963 - DNA, 26 bp, Homo sapiens
tcagactggggcccgccgcccggcga

SEQ ID NO: 7964 - DNA, 26 bp, Homo sapiens
cagactggggcccgccgcccggcgat

SEQ ID NO: 7965 - DNA, 26 bp, Homo sapiens
agactggggcccgccgcccggcgatt

SEQ ID NO: 7966 - DNA, 26 bp, Homo sapiens
gactggggcccgccgcccggcgattg

SEQ ID NO: 7967 - DNA, 26 bp, Homo sapiens
actggggcccgccgcccggcgattgg

SEQ ID NO: 7968 - DNA, 26 bp, Homo sapiens
ctggggcccgccgcccggcgattgga

SEQ ID NO: 7969 - DNA, 26 bp, Homo sapiens
tggggcccgccgcccggcgattggag

SEQ ID NO: 7970 - DNA, 26 bp, Homo sapiens
ggggcccgccgcccggcgattggaga

SEQ ID NO: 7971 - DNA, 26 bp, Homo sapiens
gggcccgccgcccggcgattggagag

SEQ ID NO: 7972 - DNA, 26 bp, Homo sapiens
ggcccgccgcccggcgattggagagc

SEQ ID NO: 7973 - DNA, 26 bp, Homo sapiens
gcccgccgcccggcgattggagagct

SEQ ID NO: 7974 - DNA, 26 bp, Homo sapiens
cccgccgcccggcgattggagagctg

SEQ ID NO: 7975 - DNA, 26 bp, Homo sapiens
ccgccgcccggcgattggagagctgc

SEQ ID NO: 7976 - DNA, 26 bp, Homo sapiens
cgccgcccggcgattggagagctgcg

SEQ ID NO: 7977 - DNA, 26 bp, Homo sapiens
gccgcccggcgattggagagctgcgc

SEQ ID NO: 7978 - DNA, 26 bp, Homo sapiens
ccgcccggcgattggagagctgcgcc

SEQ ID NO: 7979 - DNA, 26 bp, Homo sapiens
cgcccggcgattggagagctgcgccg

SEQ ID NO: 7980 - DNA, 26 bp, Homo sapiens
gcccggcgattggagagctgcgccgg

SEQ ID NO: 7981 - DNA, 26 bp, Homo sapiens
cccggcgattggagagctgcgccggc

SEQ ID NO: 7982 - DNA, 26 bp, Homo sapiens
ccggcgattggagagctgcgccggcc

SEQ ID NO: 7983 - DNA, 26 bp, Homo sapiens
cggcgattggagagctgcgccggcca

SEQ ID NO: 7984 - DNA, 26 bp, Homo sapiens
ggcgattggagagctgcgccggccac

SEQ ID NO: 7985 - DNA, 26 bp, Homo sapiens
gcgattggagagctgcgccggccacg

SEQ ID NO: 7986 - DNA, 26 bp, Homo sapiens
cgattggagagctgcgccggccacgc

SEQ ID NO: 7987 - DNA, 26 bp, Homo sapiens
gattggagagctgcgccggccacgcc

SEQ ID NO: 7988 - DNA, 26 bp, Homo sapiens
attggagagctgcgccggccacgccg

SEQ ID NO: 7989 - DNA, 26 bp, Homo sapiens
ttggagagctgcgccggccacgccga

SEQ ID NO: 7990 - DNA, 26 bp, Homo sapiens
tggagagctgcgccggccacgccgag

SEQ ID NO: 7991 - DNA, 26 bp, Homo sapiens
ggagagctgcgccggccacgccgagg

SEQ ID NO: 7992 - DNA, 26 bp, Homo sapiens
gagagctgcgccggccacgccgagga

SEQ ID NO: 7993 - DNA, 26 bp, Homo sapiens
agagctgcgccggccacgccgaggac

SEQ ID NO: 7994 - DNA, 26 bp, Homo sapiens
gagctgcgccggccacgccgaggact

SEQ ID NO: 7995 - DNA, 26 bp, Homo sapiens
agctgcgccggccacgccgaggactc

SEQ ID NO: 7996 - DNA, 26 bp, Homo sapiens
gctgcgccggccacgccgaggactca

SEQ ID NO: 7997 - DNA, 26 bp, Homo sapiens
ctgcgccggccacgccgaggactcat

SEQ ID NO: 7998 - DNA, 26 bp, Homo sapiens
tgcgccggccacgccgaggactcatt

SEQ ID NO: 7999 - DNA, 26 bp, Homo sapiens
gcgccggccacgccgaggactcatta

SEQ ID NO: 8000 - DNA, 26 bp, Homo sapiens
cgccggccacgccgaggactcattag

SEQ ID NO: 8001 - DNA, 26 bp, Homo sapiens
gccggccacgccgaggactcattagt

SEQ ID NO: 8002 - DNA, 26 bp, Homo sapiens
ccggccacgccgaggactcattagtc

SEQ ID NO: 8003 - DNA, 26 bp, Homo sapiens
cggccacgccgaggactcattagtca

SEQ ID NO: 8004 - DNA, 26 bp, Homo sapiens
ggccacgccgaggactcattagtcaa

SEQ ID NO: 8005 - DNA, 26 bp, Homo sapiens
gccacgccgaggactcattagtcaag

SEQ ID NO: 8006 - DNA, 26 bp, Homo sapiens
ccacgccgaggactcattagtcaagc

SEQ ID NO: 8007 - DNA, 26 bp, Homo sapiens
cacgccgaggactcattagtcaagct

SEQ ID NO: 8008 - DNA, 26 bp, Homo sapiens
acgccgaggactcattagtcaagctg

SEQ ID NO: 8009 - DNA, 26 bp, Homo sapiens
cgccgaggactcattagtcaagctgc

SEQ ID NO: 8010 - DNA, 26 bp, Homo sapiens
gccgaggactcattagtcaagctgcc

SEQ ID NO: 8011 - DNA, 26 bp, Homo sapiens
ccgaggactcattagtcaagctgcct

SEQ ID NO: 8012 - DNA, 26 bp, Homo sapiens
cgaggactcattagtcaagctgcctg

SEQ ID NO: 8013 - DNA, 26 bp, Homo sapiens
gaggactcattagtcaagctgcctgc

SEQ ID NO: 8014 - DNA, 26 bp, Homo sapiens
aggactcattagtcaagctgcctgcc

SEQ ID NO: 8015 - DNA, 26 bp, Homo sapiens
ggactcattagtcaagctgcctgccc

SEQ ID NO: 8016 - DNA, 26 bp, Homo sapiens
gactcattagtcaagctgcctgcccg

SEQ ID NO: 8017 - DNA, 26 bp, Homo sapiens
actcattagtcaagctgcctgcccgt

SEQ ID NO: 8018 - DNA, 26 bp, Homo sapiens
ctcattagtcaagctgcctgcccgtc

SEQ ID NO: 8019 - DNA, 26 bp, Homo sapiens
tcattagtcaagctgcctgcccgtca

SEQ ID NO: 8020 - DNA, 26 bp, Homo sapiens
cattagtcaagctgcctgcccgtcac

SEQ ID NO: 8021 - DNA, 26 bp, Homo sapiens
attagtcaagctgcctgcccgtcacc

SEQ ID NO: 8022 - DNA, 26 bp, Homo sapiens
ttagtcaagctgcctgcccgtcacca

SEQ ID NO: 8023 - DNA, 26 bp, Homo sapiens
tagtcaagctgcctgcccgtcaccat

SEQ ID NO: 8024 - DNA, 26 bp, Homo sapiens
agtcaagctgcctgcccgtcaccatg

SEQ ID NO: 8025 - DNA, 26 bp, Homo sapiens
gtcaagctgcctgcccgtcaccatga

SEQ ID NO: 8026 - DNA, 26 bp, Homo sapiens
tcaagctgcctgcccgtcaccatgag

SEQ ID NO: 8027 - DNA, 26 bp, Homo sapiens
caagctgcctgcccgtcaccatgagc

SEQ ID NO: 8028 - DNA, 26 bp, Homo sapiens
aagctgcctgcccgtcaccatgagct

SEQ ID NO: 8029 - DNA, 26 bp, Homo sapiens
agctgcctgcccgtcaccatgagcta

SEQ ID NO: 8030 - DNA, 26 bp, Homo sapiens
gctgcctgcccgtcaccatgagctag

SEQ ID NO: 8031 - DNA, 26 bp, Homo sapiens
ctgcctgcccgtcaccatgagctagt

SEQ ID NO: 8032 - DNA, 26 bp, Homo sapiens
tgcctgcccgtcaccatgagctagta

SEQ ID NO: 8033 - DNA, 26 bp, Homo sapiens
gcctgcccgtcaccatgagctagtac

SEQ ID NO: 8034 - DNA, 26 bp, Homo sapiens
cctgcccgtcaccatgagctagtact

SEQ ID NO: 8035 - DNA, 26 bp, Homo sapiens
ctgcccgtcaccatgagctagtactc

SEQ ID NO: 8036 - DNA, 26 bp, Homo sapiens
tgcccgtcaccatgagctagtactcc

SEQ ID NO: 8037 - DNA, 26 bp, Homo sapiens
gcccgtcaccatgagctagtactcca

SEQ ID NO: 8038 - DNA, 26 bp, Homo sapiens
cccgtcaccatgagctagtactccat

SEQ ID NO: 8039 - DNA, 26 bp, Homo sapiens
ccgtcaccatgagctagtactccatt

SEQ ID NO: 8040 - DNA, 26 bp, Homo sapiens
cgtcaccatgagctagtactccattg

SEQ ID NO: 8041 - DNA, 26 bp, Homo sapiens
gtcaccatgagctagtactccattgg

SEQ ID NO: 8042 - DNA, 26 bp, Homo sapiens
tcaccatgagctagtactccattggg

SEQ ID NO: 8043 - DNA, 26 bp, Homo sapiens
caccatgagctagtactccattgggg

SEQ ID NO: 8044 - DNA, 26 bp, Homo sapiens
accatgagctagtactccattgggga

SEQ ID NO: 8045 - DNA, 26 bp, Homo sapiens
ccatgagctagtactccattggggaa

SEQ ID NO: 8046 - DNA, 26 bp, Homo sapiens
catgagctagtactccattggggaat

SEQ ID NO: 8047 - DNA, 26 bp, Homo sapiens
atgagctagtactccattggggaata

SEQ ID NO: 8048 - DNA, 26 bp, Homo sapiens
tgagctagtactccattggggaatat

SEQ ID NO: 8049 - DNA, 26 bp, Homo sapiens
gagctagtactccattggggaatatt

SEQ ID NO: 8050 - DNA, 26 bp, Homo sapiens
agctagtactccattggggaatatta

SEQ ID NO: 8051 - DNA, 26 bp, Homo sapiens
gctagtactccattggggaatattac

SEQ ID NO: 8052 - DNA, 26 bp, Homo sapiens
ctagtactccattggggaatattact

SEQ ID NO: 8053 - DNA, 26 bp, Homo sapiens
tagtactccattggggaatattactt

SEQ ID NO: 8054 - DNA, 26 bp, Homo sapiens
agtactccattggggaatattacttg

SEQ ID NO: 8055 - DNA, 26 bp, Homo sapiens
gtactccattggggaatattacttgg

SEQ ID NO: 8056 - DNA, 26 bp, Homo sapiens
tactccattggggaatattacttggc

SEQ ID NO: 8057 - DNA, 26 bp, Homo sapiens
actccattggggaatattacttggca

SEQ ID NO: 8058 - DNA, 26 bp, Homo sapiens
ctccattggggaatattacttggcaa

SEQ ID NO: 8059 - DNA, 26 bp, Homo sapiens
tccattggggaatattacttggcaat

SEQ ID NO: 8060 - DNA, 26 bp, Homo sapiens
ccattggggaatattacttggcaatc

SEQ ID NO: 8061 - DNA, 26 bp, Homo sapiens
cattggggaatattacttggcaatca

SEQ ID NO: 8062 - DNA, 26 bp, Homo sapiens
attggggaatattacttggcaatcaa

SEQ ID NO: 8063 - DNA, 26 bp, Homo sapiens
ttggggaatattacttggcaatcaaa

SEQ ID NO: 8064 - DNA, 26 bp, Homo sapiens
tggggaatattacttggcaatcaaat

SEQ ID NO: 8065 - DNA, 26 bp, Homo sapiens
ggggaatattacttggcaatcaaata

SEQ ID NO: 8066 - DNA, 26 bp, Homo sapiens
gggaatattacttggcaatcaaataa

SEQ ID NO: 8067 - DNA, 26 bp, Homo sapiens
ggaatattacttggcaatcaaataag

SEQ ID NO: 8068 - DNA, 26 bp, Homo sapiens
gaatattacttggcaatcaaataagg

SEQ ID NO: 8069 - DNA, 26 bp, Homo sapiens
aatattacttggcaatcaaataaggc

SEQ ID NO: 8070 - DNA, 26 bp, Homo sapiens
atattacttggcaatcaaataaggcc

SEQ ID NO: 8071 - DNA, 26 bp, Homo sapiens
tattacttggcaatcaaataaggccc

SEQ ID NO: 8072 - DNA, 26 bp, Homo sapiens
attacttggcaatcaaataaggcccc

SEQ ID NO: 8073 - DNA, 26 bp, Homo sapiens
ttacttggcaatcaaataaggcccca

SEQ ID NO: 8074 - DNA, 26 bp, Homo sapiens
tacttggcaatcaaataaggccccac

SEQ ID NO: 8075 - DNA, 26 bp, Homo sapiens
acttggcaatcaaataaggccccacc

SEQ ID NO: 8076 - DNA, 26 bp, Homo sapiens
cttggcaatcaaataaggccccacct

SEQ ID NO: 8077 - DNA, 26 bp, Homo sapiens
ttggcaatcaaataaggccccacctc

SEQ ID NO: 8078 - DNA, 26 bp, Homo sapiens
tggcaatcaaataaggccccacctct

SEQ ID NO: 8079 - DNA, 26 bp, Homo sapiens
ggcaatcaaataaggccccacctcta

SEQ ID NO: 8080 - DNA, 26 bp, Homo sapiens
gcaatcaaataaggccccacctctaa

SEQ ID NO: 8081 - DNA, 26 bp, Homo sapiens
caatcaaataaggccccacctctaag

SEQ ID NO: 8082 - DNA, 26 bp, Homo sapiens
aatcaaataaggccccacctctaagg

SEQ ID NO: 8083 - DNA, 26 bp, Homo sapiens
atcaaataaggccccacctctaaggc

SEQ ID NO: 8084 - DNA, 26 bp, Homo sapiens
tcaaataaggccccacctctaaggcg

SEQ ID NO: 8085 - DNA, 26 bp, Homo sapiens
caaataaggccccacctctaaggcgg

SEQ ID NO: 8086 - DNA, 26 bp, Homo sapiens
aaataaggccccacctctaaggcggg

SEQ ID NO: 8087 - DNA, 26 bp, Homo sapiens
aataaggccccacctctaaggcgggg

SEQ ID NO: 8088 - DNA, 26 bp, Homo sapiens
ataaggccccacctctaaggcggggc

SEQ ID NO: 8089 - DNA, 26 bp, Homo sapiens
taaggccccacctctaaggcggggca

SEQ ID NO: 8090 - DNA, 26 bp, Homo sapiens
aaggccccacctctaaggcggggcac

SEQ ID NO: 8091 - DNA, 26 bp, Homo sapiens
aggccccacctctaaggcggggcact

SEQ ID NO: 8092 - DNA, 26 bp, Homo sapiens
ggccccacctctaaggcggggcactg

SEQ ID NO: 8093 - DNA, 26 bp, Homo sapiens
gccccacctctaaggcggggcactgc

SEQ ID NO: 8094 - DNA, 26 bp, Homo sapiens
ccccacctctaaggcggggcactgcg

SEQ ID NO: 8095 - DNA, 26 bp, Homo sapiens
cccacctctaaggcggggcactgcgc

SEQ ID NO: 8096 - DNA, 26 bp, Homo sapiens
ccacctctaaggcggggcactgcgcc

SEQ ID NO: 8097 - DNA, 26 bp, Homo sapiens
cacctctaaggcggggcactgcgcca

SEQ ID NO: 8098 - DNA, 26 bp, Homo sapiens
acctctaaggcggggcactgcgccaa

SEQ ID NO: 8099 - DNA, 26 bp, Homo sapiens
cctctaaggcggggcactgcgccaaa

SEQ ID NO: 8100 - DNA, 26 bp, Homo sapiens
ctctaaggcggggcactgcgccaaat

SEQ ID NO: 8101 - DNA, 26 bp, Homo sapiens
tctaaggcggggcactgcgccaaatt

SEQ ID NO: 8102 - DNA, 26 bp, Homo sapiens
ctaaggcggggcactgcgccaaattc

SEQ ID NO: 8103 - DNA, 26 bp, Homo sapiens
taaggcggggcactgcgccaaattct

SEQ ID NO: 8104 - DNA, 26 bp, Homo sapiens
aaggcggggcactgcgccaaattctc

SEQ ID NO: 8105 - DNA, 26 bp, Homo sapiens
aggcggggcactgcgccaaattctca

SEQ ID NO: 8106 - DNA, 26 bp, Homo sapiens
ggcggggcactgcgccaaattctcaa

SEQ ID NO: 8107 - DNA, 26 bp, Homo sapiens
gcggggcactgcgccaaattctcaaa

SEQ ID NO: 8108 - DNA, 26 bp, Homo sapiens
cggggcactgcgccaaattctcaaat

SEQ ID NO: 8109 - DNA, 26 bp, Homo sapiens
ggggcactgcgccaaattctcaaatc

SEQ ID NO: 8110 - DNA, 26 bp, Homo sapiens
gggcactgcgccaaattctcaaatcc

SEQ ID NO: 8111 - DNA, 26 bp, Homo sapiens
ggcactgcgccaaattctcaaatccc

SEQ ID NO: 8112 - DNA, 26 bp, Homo sapiens
gcactgcgccaaattctcaaatcccg

SEQ ID NO: 8113 - DNA, 26 bp, Homo sapiens
cactgcgccaaattctcaaatcccgg

SEQ ID NO: 8114 - DNA, 26 bp, Homo sapiens
actgcgccaaattctcaaatcccggt

SEQ ID NO: 8115 - DNA, 26 bp, Homo sapiens
ctgcgccaaattctcaaatcccggta

SEQ ID NO: 8116 - DNA, 26 bp, Homo sapiens
tgcgccaaattctcaaatcccggtag

SEQ ID NO: 8117 - DNA, 26 bp, Homo sapiens
gcgccaaattctcaaatcccggtagg

SEQ ID NO: 8118 - DNA, 26 bp, Homo sapiens
cgccaaattctcaaatcccggtaggg

SEQ ID NO: 8119 - DNA, 26 bp, Homo sapiens
gccaaattctcaaatcccggtagggg

SEQ ID NO: 8120 - DNA, 26 bp, Homo sapiens
ccaaattctcaaatcccggtagggga

SEQ ID NO: 8121 - DNA, 26 bp, Homo sapiens
caaattctcaaatcccggtaggggaa

SEQ ID NO: 8122 - DNA, 26 bp, Homo sapiens
aaattctcaaatcccggtaggggaaa

SEQ ID NO: 8123 - DNA, 26 bp, Homo sapiens
aattctcaaatcccggtaggggaaat

SEQ ID NO: 8124 - DNA, 26 bp, Homo sapiens
attctcaaatcccggtaggggaaatc

SEQ ID NO: 8125 - DNA, 26 bp, Homo sapiens
ttctcaaatcccggtaggggaaatct

SEQ ID NO: 8126 - DNA, 26 bp, Homo sapiens
tctcaaatcccggtaggggaaatctg

SEQ ID NO: 8127 - DNA, 26 bp, Homo sapiens
ctcaaatcccggtaggggaaatctgc

SEQ ID NO: 8128 - DNA, 26 bp, Homo sapiens
tcaaatcccggtaggggaaatctgcc

SEQ ID NO: 8129 - DNA, 26 bp, Homo sapiens
caaatcccggtaggggaaatctgcct

SEQ ID NO: 8130 - DNA, 26 bp, Homo sapiens
aaatcccggtaggggaaatctgcctg

SEQ ID NO: 8131 - DNA, 26 bp, Homo sapiens
aatcccggtaggggaaatctgcctgt

SEQ ID NO: 8132 - DNA, 26 bp, Homo sapiens
atcccggtaggggaaatctgcctgtc

SEQ ID NO: 8133 - DNA, 26 bp, Homo sapiens
tcccggtaggggaaatctgcctgtca

SEQ ID NO: 8134 - DNA, 26 bp, Homo sapiens
cccggtaggggaaatctgcctgtcaa

SEQ ID NO: 8135 - DNA, 26 bp, Homo sapiens
ccggtaggggaaatctgcctgtcaat

SEQ ID NO: 8136 - DNA, 26 bp, Homo sapiens
cggtaggggaaatctgcctgtcaatc

SEQ ID NO: 8137 - DNA, 26 bp, Homo sapiens
ggtaggggaaatctgcctgtcaatca

SEQ ID NO: 8138 - DNA, 26 bp, Homo sapiens
gtaggggaaatctgcctgtcaatcaa

SEQ ID NO: 8139 - DNA, 26 bp, Homo sapiens
taggggaaatctgcctgtcaatcaac

SEQ ID NO: 8140 - DNA, 26 bp, Homo sapiens
aggggaaatctgcctgtcaatcaaca

SEQ ID NO: 8141 - DNA, 26 bp, Homo sapiens
ggggaaatctgcctgtcaatcaacac

SEQ ID NO: 8142 - DNA, 26 bp, Homo sapiens
gggaaatctgcctgtcaatcaacacg

SEQ ID NO: 8143 - DNA, 26 bp, Homo sapiens
ggaaatctgcctgtcaatcaacacgc

SEQ ID NO: 8144 - DNA, 26 bp, Homo sapiens
gaaatctgcctgtcaatcaacacgcg

SEQ ID NO: 8145 - DNA, 26 bp, Homo sapiens
aaatctgcctgtcaatcaacacgcgt

SEQ ID NO: 8146 - DNA, 26 bp, Homo sapiens
aatctgcctgtcaatcaacacgcgtc

SEQ ID NO: 8147 - DNA, 26 bp, Homo sapiens
atctgcctgtcaatcaacacgcgtcc

SEQ ID NO: 8148 - DNA, 26 bp, Homo sapiens
tctgcctgtcaatcaacacgcgtccc

SEQ ID NO: 8149 - DNA, 26 bp, Homo sapiens
ctgcctgtcaatcaacacgcgtccca

SEQ ID NO: 8150 - DNA, 26 bp, Homo sapiens
tgcctgtcaatcaacacgcgtcccac

SEQ ID NO: 8151 - DNA, 26 bp, Homo sapiens
gcctgtcaatcaacacgcgtcccacc

SEQ ID NO: 8152 - DNA, 26 bp, Homo sapiens
cctgtcaatcaacacgcgtcccacct

SEQ ID NO: 8153 - DNA, 26 bp, Homo sapiens
ctgtcaatcaacacgcgtcccacctc

SEQ ID NO: 8154 - DNA, 26 bp, Homo sapiens
tgtcaatcaacacgcgtcccacctcc

SEQ ID NO: 8155 - DNA, 26 bp, Homo sapiens
gtcaatcaacacgcgtcccacctcct

SEQ ID NO: 8156 - DNA, 26 bp, Homo sapiens
tcaatcaacacgcgtcccacctccta

SEQ ID NO: 8157 - DNA, 26 bp, Homo sapiens
caatcaacacgcgtcccacctcctat

SEQ ID NO: 8158 - DNA, 26 bp, Homo sapiens
aatcaacacgcgtcccacctcctatc

SEQ ID NO: 8159 - DNA, 26 bp, Homo sapiens
atcaacacgcgtcccacctcctatcg

SEQ ID NO: 8160 - DNA, 26 bp, Homo sapiens
tcaacacgcgtcccacctcctatcga

SEQ ID NO: 8161 - DNA, 26 bp, Homo sapiens
caacacgcgtcccacctcctatcgag

SEQ ID NO: 8162 - DNA, 26 bp, Homo sapiens
aacacgcgtcccacctcctatcgagt

SEQ ID NO: 8163 - DNA, 26 bp, Homo sapiens
acacgcgtcccacctcctatcgagtc

SEQ ID NO: 8164 - DNA, 26 bp, Homo sapiens
cacgcgtcccacctcctatcgagtcc

SEQ ID NO: 8165 - DNA, 26 bp, Homo sapiens
acgcgtcccacctcctatcgagtcct

SEQ ID NO: 8166 - DNA, 26 bp, Homo sapiens
cgcgtcccacctcctatcgagtcctt

SEQ ID NO: 8167 - DNA, 26 bp, Homo sapiens
gcgtcccacctcctatcgagtcctta

SEQ ID NO: 8168 - DNA, 26 bp, Homo sapiens
cgtcccacctcctatcgagtccttag

SEQ ID NO: 8169 - DNA, 26 bp, Homo sapiens
gtcccacctcctatcgagtccttagg

SEQ ID NO: 8170 - DNA, 26 bp, Homo sapiens
tcccacctcctatcgagtccttaggt

SEQ ID NO: 8171 - DNA, 26 bp, Homo sapiens
cccacctcctatcgagtccttaggta

SEQ ID NO: 8172 - DNA, 26 bp, Homo sapiens
ccacctcctatcgagtccttaggtaa

SEQ ID NO: 8173 - DNA, 26 bp, Homo sapiens
cacctcctatcgagtccttaggtaat

SEQ ID NO: 8174 - DNA, 26 bp, Homo sapiens
acctcctatcgagtccttaggtaata

SEQ ID NO: 8175 - DNA, 26 bp, Homo sapiens
cctcctatcgagtccttaggtaataa

SEQ ID NO: 8176 - DNA, 26 bp, Homo sapiens
ctcctatcgagtccttaggtaataat

SEQ ID NO: 8177 - DNA, 26 bp, Homo sapiens
tcctatcgagtccttaggtaataata

SEQ ID NO: 8178 - DNA, 26 bp, Homo sapiens
cctatcgagtccttaggtaataatac

SEQ ID NO: 8179 - DNA, 26 bp, Homo sapiens
ctatcgagtccttaggtaataatacc

SEQ ID NO: 8180 - DNA, 26 bp, Homo sapiens
tatcgagtccttaggtaataataccg

SEQ ID NO: 8181 - DNA, 26 bp, Homo sapiens
atcgagtccttaggtaataataccgc

SEQ ID NO: 8182 - DNA, 26 bp, Homo sapiens
tcgagtccttaggtaataataccgcc

SEQ ID NO: 8183 - DNA, 26 bp, Homo sapiens
cgagtccttaggtaataataccgcca

SEQ ID NO: 8184 - DNA, 26 bp, Homo sapiens
gagtccttaggtaataataccgccac

SEQ ID NO: 8185 - DNA, 26 bp, Homo sapiens
agtccttaggtaataataccgccacg

SEQ ID NO: 8186 - DNA, 26 bp, Homo sapiens
gtccttaggtaataataccgccacgc

SEQ ID NO: 8187 - DNA, 26 bp, Homo sapiens
tccttaggtaataataccgccacgct

SEQ ID NO: 8188 - DNA, 26 bp, Homo sapiens
ccttaggtaataataccgccacgctg

SEQ ID NO: 8189 - DNA, 26 bp, Homo sapiens
cttaggtaataataccgccacgctgt

SEQ ID NO: 8190 - DNA, 26 bp, Homo sapiens
ttaggtaataataccgccacgctgtg

SEQ ID NO: 8191 - DNA, 26 bp, Homo sapiens
taggtaataataccgccacgctgtga

SEQ ID NO: 8192 - DNA, 26 bp, Homo sapiens
aggtaataataccgccacgctgtgac

SEQ ID NO: 8193 - DNA, 26 bp, Homo sapiens
ggtaataataccgccacgctgtgacg

SEQ ID NO: 8194 - DNA, 26 bp, Homo sapiens
gtaataataccgccacgctgtgacga

SEQ ID NO: 8195 - DNA, 26 bp, Homo sapiens
taataataccgccacgctgtgacgat

SEQ ID NO: 8196 - DNA, 26 bp, Homo sapiens
aataataccgccacgctgtgacgata

SEQ ID NO: 8197 - DNA, 26 bp, Homo sapiens
ataataccgccacgctgtgacgatat

SEQ ID NO: 8198 - DNA, 26 bp, Homo sapiens
taataccgccacgctgtgacgatatt

SEQ ID NO: 8199 - DNA, 26 bp, Homo sapiens
aataccgccacgctgtgacgatattc

SEQ ID NO: 8200 - DNA, 26 bp, Homo sapiens
ataccgccacgctgtgacgatattcc

SEQ ID NO: 8201 - DNA, 26 bp, Homo sapiens
taccgccacgctgtgacgatattcct

SEQ ID NO: 8202 - DNA, 26 bp, Homo sapiens
accgccacgctgtgacgatattcctg

SEQ ID NO: 8203 - DNA, 26 bp, Homo sapiens
ccgccacgctgtgacgatattcctgc

SEQ ID NO: 8204 - DNA, 26 bp, Homo sapiens
cgccacgctgtgacgatattcctgct

SEQ ID NO: 8205 - DNA, 26 bp, Homo sapiens
gccacgctgtgacgatattcctgctt

SEQ ID NO: 8206 - DNA, 26 bp, Homo sapiens
ccacgctgtgacgatattcctgcttc

SEQ ID NO: 8207 - DNA, 26 bp, Homo sapiens
cacgctgtgacgatattcctgcttct

SEQ ID NO: 8208 - DNA, 26 bp, Homo sapiens
acgctgtgacgatattcctgcttctc

SEQ ID NO: 8209 - DNA, 26 bp, Homo sapiens
cgctgtgacgatattcctgcttctcc

SEQ ID NO: 8210 - DNA, 26 bp, Homo sapiens
gctgtgacgatattcctgcttctccc

SEQ ID NO: 8211 - DNA, 26 bp, Homo sapiens
ctgtgacgatattcctgcttctcccc

SEQ ID NO: 8212 - DNA, 26 bp, Homo sapiens
tgtgacgatattcctgcttctccccg

SEQ ID NO: 8213 - DNA, 26 bp, Homo sapiens
gtgacgatattcctgcttctccccgg

SEQ ID NO: 8214 - DNA, 26 bp, Homo sapiens
tgacgatattcctgcttctccccggc

SEQ ID NO: 8215 - DNA, 26 bp, Homo sapiens
gacgatattcctgcttctccccggcc

SEQ ID NO: 8216 - DNA, 26 bp, Homo sapiens
acgatattcctgcttctccccggcct

SEQ ID NO: 8217 - DNA, 26 bp, Homo sapiens
cgatattcctgcttctccccggccta

SEQ ID NO: 8218 - DNA, 26 bp, Homo sapiens
gatattcctgcttctccccggcctac

SEQ ID NO: 8219 - DNA, 26 bp, Homo sapiens
atattcctgcttctccccggcctacg

SEQ ID NO: 8220 - DNA, 26 bp, Homo sapiens
tattcctgcttctccccggcctacgg

SEQ ID NO: 8221 - DNA, 26 bp, Homo sapiens
attcctgcttctccccggcctacggg

SEQ ID NO: 8222 - DNA, 26 bp, Homo sapiens
ttcctgcttctccccggcctacgggc

SEQ ID NO: 8223 - DNA, 26 bp, Homo sapiens
tcctgcttctccccggcctacgggcg

SEQ ID NO: 8224 - DNA, 26 bp, Homo sapiens
cctgcttctccccggcctacgggcgg

SEQ ID NO: 8225 - DNA, 26 bp, Homo sapiens
ctgcttctccccggcctacgggcggg

SEQ ID NO: 8226 - DNA, 26 bp, Homo sapiens
tgcttctccccggcctacgggcgggc

SEQ ID NO: 8227 - DNA, 26 bp, Homo sapiens
gcttctccccggcctacgggcgggcc

SEQ ID NO: 8228 - DNA, 26 bp, Homo sapiens
cttctccccggcctacgggcgggccc

SEQ ID NO: 8229 - DNA, 26 bp, Homo sapiens
ttctccccggcctacgggcgggcccg

SEQ ID NO: 8230 - DNA, 26 bp, Homo sapiens
tctccccggcctacgggcgggcccgc

SEQ ID NO: 8231 - DNA, 26 bp, Homo sapiens
ctccccggcctacgggcgggcccgcg

SEQ ID NO: 8232 - DNA, 26 bp, Homo sapiens
tccccggcctacgggcgggcccgcga

SEQ ID NO: 8233 - DNA, 26 bp, Homo sapiens
ccccggcctacgggcgggcccgcgaa

SEQ ID NO: 8234 - DNA, 26 bp, Homo sapiens
cccggcctacgggcgggcccgcgaag

SEQ ID NO: 8235 - DNA, 26 bp, Homo sapiens
ccggcctacgggcgggcccgcgaagt

SEQ ID NO: 8236 - DNA, 26 bp, Homo sapiens
cggcctacgggcgggcccgcgaagta

SEQ ID NO: 8237 - DNA, 26 bp, Homo sapiens
ggcctacgggcgggcccgcgaagtat

SEQ ID NO: 8238 - DNA, 26 bp, Homo sapiens
gcctacgggcgggcccgcgaagtatg

SEQ ID NO: 8239 - DNA, 26 bp, Homo sapiens
cctacgggcgggcccgcgaagtatgg

SEQ ID NO: 8240 - DNA, 26 bp, Homo sapiens
ctacgggcgggcccgcgaagtatggg

SEQ ID NO: 8241 - DNA, 26 bp, Homo sapiens
tacgggcgggcccgcgaagtatggga

SEQ ID NO: 8242 - DNA, 26 bp, Homo sapiens
acgggcgggcccgcgaagtatgggac

SEQ ID NO: 8243 - DNA, 26 bp, Homo sapiens
cgggcgggcccgcgaagtatgggacg

SEQ ID NO: 8244 - DNA, 26 bp, Homo sapiens
gggcgggcccgcgaagtatgggacgc

SEQ ID NO: 8245 - DNA, 26 bp, Homo sapiens
ggcgggcccgcgaagtatgggacgct

SEQ ID NO: 8246 - DNA, 26 bp, Homo sapiens
gcgggcccgcgaagtatgggacgctc

SEQ ID NO: 8247 - DNA, 26 bp, Homo sapiens
cgggcccgcgaagtatgggacgctcc

SEQ ID NO: 8248 - DNA, 26 bp, Homo sapiens
gggcccgcgaagtatgggacgctccg

SEQ ID NO: 8249 - DNA, 26 bp, Homo sapiens
ggcccgcgaagtatgggacgctccgt

SEQ ID NO: 8250 - DNA, 26 bp, Homo sapiens
gcccgcgaagtatgggacgctccgtg

SEQ ID NO: 8251 - DNA, 26 bp, Homo sapiens
cccgcgaagtatgggacgctccgtga

SEQ ID NO: 8252 - DNA, 26 bp, Homo sapiens
ccgcgaagtatgggacgctccgtgat

SEQ ID NO: 8253 - DNA, 26 bp, Homo sapiens
cgcgaagtatgggacgctccgtgatt

SEQ ID NO: 8254 - DNA, 26 bp, Homo sapiens
gcgaagtatgggacgctccgtgattg

SEQ ID NO: 8255 - DNA, 26 bp, Homo sapiens
cgaagtatgggacgctccgtgattgg

SEQ ID NO: 8256 - DNA, 26 bp, Homo sapiens
gaagtatgggacgctccgtgattggc

SEQ ID NO: 8257 - DNA, 26 bp, Homo sapiens
aagtatgggacgctccgtgattggcc

SEQ ID NO: 8258 - DNA, 26 bp, Homo sapiens
agtatgggacgctccgtgattggccc

SEQ ID NO: 8259 - DNA, 26 bp, Homo sapiens
gtatgggacgctccgtgattggccct

SEQ ID NO: 8260 - DNA, 26 bp, Homo sapiens
tatgggacgctccgtgattggcccta

SEQ ID NO: 8261 - DNA, 26 bp, Homo sapiens
atgggacgctccgtgattggccctag

SEQ ID NO: 8262 - DNA, 26 bp, Homo sapiens
tgggacgctccgtgattggccctagc

SEQ ID NO: 8263 - DNA, 26 bp, Homo sapiens
gggacgctccgtgattggccctagct

SEQ ID NO: 8264 - DNA, 26 bp, Homo sapiens
ggacgctccgtgattggccctagcta

SEQ ID NO: 8265 - DNA, 26 bp, Homo sapiens
gacgctccgtgattggccctagctag

SEQ ID NO: 8266 - DNA, 26 bp, Homo sapiens
acgctccgtgattggccctagctagg

SEQ ID NO: 8267 - DNA, 26 bp, Homo sapiens
cgctccgtgattggccctagctaggc

SEQ ID NO: 8268 - DNA, 26 bp, Homo sapiens
gctccgtgattggccctagctaggcg

SEQ ID NO: 8269 - DNA, 26 bp, Homo sapiens
ctccgtgattggccctagctaggcga

SEQ ID NO: 8270 - DNA, 26 bp, Homo sapiens
tccgtgattggccctagctaggcgac

SEQ ID NO: 8271 - DNA, 26 bp, Homo sapiens
ccgtgattggccctagctaggcgact

SEQ ID NO: 8272 - DNA, 26 bp, Homo sapiens
cgtgattggccctagctaggcgactg

SEQ ID NO: 8273 - DNA, 26 bp, Homo sapiens
gtgattggccctagctaggcgactgg

SEQ ID NO: 8274 - DNA, 26 bp, Homo sapiens
tgattggccctagctaggcgactgga

SEQ ID NO: 8275 - DNA, 26 bp, Homo sapiens
gattggccctagctaggcgactggaa

SEQ ID NO: 8276 - DNA, 26 bp, Homo sapiens
attggccctagctaggcgactggaaa

SEQ ID NO: 8277 - DNA, 26 bp, Homo sapiens
ttggccctagctaggcgactggaaag

SEQ ID NO: 8278 - DNA, 26 bp, Homo sapiens
tggccctagctaggcgactggaaagg

SEQ ID NO: 8279 - DNA, 26 bp, Homo sapiens
ggccctagctaggcgactggaaagga

SEQ ID NO: 8280 - DNA, 26 bp, Homo sapiens
gccctagctaggcgactggaaaggac

SEQ ID NO: 8281 - DNA, 26 bp, Homo sapiens
ccctagctaggcgactggaaaggacc

SEQ ID NO: 8282 - DNA, 26 bp, Homo sapiens
cctagctaggcgactggaaaggacca

SEQ ID NO: 8283 - DNA, 26 bp, Homo sapiens
ctagctaggcgactggaaaggaccaa

SEQ ID NO: 8284 - DNA, 26 bp, Homo sapiens
tagctaggcgactggaaaggaccaat

SEQ ID NO: 8285 - DNA, 26 bp, Homo sapiens
agctaggcgactggaaaggaccaatc

SEQ ID NO: 8286 - DNA, 26 bp, Homo sapiens
gctaggcgactggaaaggaccaatct

SEQ ID NO: 8287 - DNA, 26 bp, Homo sapiens
ctaggcgactggaaaggaccaatctt

SEQ ID NO: 8288 - DNA, 26 bp, Homo sapiens
taggcgactggaaaggaccaatcttc

SEQ ID NO: 8289 - DNA, 26 bp, Homo sapiens
aggcgactggaaaggaccaatcttcc

SEQ ID NO: 8290 - DNA, 26 bp, Homo sapiens
ggcgactggaaaggaccaatcttccg

SEQ ID NO: 8291 - DNA, 26 bp, Homo sapiens
gcgactggaaaggaccaatcttccga

SEQ ID NO: 8292 - DNA, 26 bp, Homo sapiens
cgactggaaaggaccaatcttccgat

SEQ ID NO: 8293 - DNA, 26 bp, Homo sapiens
gactggaaaggaccaatcttccgatc

SEQ ID NO: 8294 - DNA, 26 bp, Homo sapiens
actggaaaggaccaatcttccgatcg

SEQ ID NO: 8295 - DNA, 26 bp, Homo sapiens
ctggaaaggaccaatcttccgatcgc

SEQ ID NO: 8296 - DNA, 26 bp, Homo sapiens
tggaaaggaccaatcttccgatcgcc

SEQ ID NO: 8297 - DNA, 26 bp, Homo sapiens
ggaaaggaccaatcttccgatcgcct

SEQ ID NO: 8298 - DNA, 26 bp, Homo sapiens
gaaaggaccaatcttccgatcgcctc

SEQ ID NO: 8299 - DNA, 26 bp, Homo sapiens
aaaggaccaatcttccgatcgcctca

SEQ ID NO: 8300 - DNA, 26 bp, Homo sapiens
aaggaccaatcttccgatcgcctcac

SEQ ID NO: 8301 - DNA, 26 bp, Homo sapiens
aggaccaatcttccgatcgcctcacc

SEQ ID NO: 8302 - DNA, 26 bp, Homo sapiens
ggaccaatcttccgatcgcctcaccg

SEQ ID NO: 8303 - DNA, 26 bp, Homo sapiens
gaccaatcttccgatcgcctcaccgc

SEQ ID NO: 8304 - DNA, 26 bp, Homo sapiens
accaatcttccgatcgcctcaccgca

SEQ ID NO: 8305 - DNA, 26 bp, Homo sapiens
ccaatcttccgatcgcctcaccgcag

SEQ ID NO: 8306 - DNA, 26 bp, Homo sapiens
caatcttccgatcgcctcaccgcagt

SEQ ID NO: 8307 - DNA, 26 bp, Homo sapiens
aatcttccgatcgcctcaccgcagtg

SEQ ID NO: 8308 - DNA, 26 bp, Homo sapiens
atcttccgatcgcctcaccgcagtgg

SEQ ID NO: 8309 - DNA, 26 bp, Homo sapiens
tcttccgatcgcctcaccgcagtggc

SEQ ID NO: 8310 - DNA, 26 bp, Homo sapiens
cttccgatcgcctcaccgcagtggcc

SEQ ID NO: 8311 - DNA, 26 bp, Homo sapiens
ttccgatcgcctcaccgcagtggccc

SEQ ID NO: 8312 - DNA, 26 bp, Homo sapiens
tccgatcgcctcaccgcagtggccca

SEQ ID NO: 8313 - DNA, 26 bp, Homo sapiens
ccgatcgcctcaccgcagtggcccag

SEQ ID NO: 8314 - DNA, 26 bp, Homo sapiens
cgatcgcctcaccgcagtggcccagt

SEQ ID NO: 8315 - DNA, 26 bp, Homo sapiens
gatcgcctcaccgcagtggcccagtc

SEQ ID NO: 8316 - DNA, 26 bp, Homo sapiens
atcgcctcaccgcagtggcccagtct

SEQ ID NO: 8317 - DNA, 26 bp, Homo sapiens
tcgcctcaccgcagtggcccagtctc

SEQ ID NO: 8318 - DNA, 26 bp, Homo sapiens
cgcctcaccgcagtggcccagtctca

SEQ ID NO: 8319 - DNA, 26 bp, Homo sapiens
gcctcaccgcagtggcccagtctcag

SEQ ID NO: 8320 - DNA, 26 bp, Homo sapiens
cctcaccgcagtggcccagtctcaga

SEQ ID NO: 8321 - DNA, 26 bp, Homo sapiens
ctcaccgcagtggcccagtctcagat

SEQ ID NO: 8322 - DNA, 26 bp, Homo sapiens
tcaccgcagtggcccagtctcagatg

SEQ ID NO: 8323 - DNA, 26 bp, Homo sapiens
caccgcagtggcccagtctcagatgc

SEQ ID NO: 8324 - DNA, 26 bp, Homo sapiens
accgcagtggcccagtctcagatgcc

SEQ ID NO: 8325 - DNA, 26 bp, Homo sapiens
ccgcagtggcccagtctcagatgccg

SEQ ID NO: 8326 - DNA, 26 bp, Homo sapiens
cgcagtggcccagtctcagatgccga

SEQ ID NO: 8327 - DNA, 26 bp, Homo sapiens
gcagtggcccagtctcagatgccgat

SEQ ID NO: 8328 - DNA, 26 bp, Homo sapiens
cagtggcccagtctcagatgccgatt

SEQ ID NO: 8329 - DNA, 26 bp, Homo sapiens
agtggcccagtctcagatgccgattg

SEQ ID NO: 8330 - DNA, 26 bp, Homo sapiens
gtggcccagtctcagatgccgattgg

SEQ ID NO: 8331 - DNA, 26 bp, Homo sapiens
tggcccagtctcagatgccgattggc

SEQ ID NO: 8332 - DNA, 26 bp, Homo sapiens
ggcccagtctcagatgccgattggct

SEQ ID NO: 8333 - DNA, 26 bp, Homo sapiens
gcccagtctcagatgccgattggctt

SEQ ID NO: 8334 - DNA, 26 bp, Homo sapiens
cccagtctcagatgccgattggcttg

SEQ ID NO: 8335 - DNA, 26 bp, Homo sapiens
ccagtctcagatgccgattggcttgc

SEQ ID NO: 8336 - DNA, 26 bp, Homo sapiens
cagtctcagatgccgattggcttgcg

SEQ ID NO: 8337 - DNA, 26 bp, Homo sapiens
agtctcagatgccgattggcttgcga

SEQ ID NO: 8338 - DNA, 26 bp, Homo sapiens
gtctcagatgccgattggcttgcgag

SEQ ID NO: 8339 - DNA, 26 bp, Homo sapiens
tctcagatgccgattggcttgcgaga

SEQ ID NO: 8340 - DNA, 26 bp, Homo sapiens
ctcagatgccgattggcttgcgagag

SEQ ID NO: 8341 - DNA, 26 bp, Homo sapiens
tcagatgccgattggcttgcgagagt

SEQ ID NO: 8342 - DNA, 26 bp, Homo sapiens
cagatgccgattggcttgcgagagtc

SEQ ID NO: 8343 - DNA, 26 bp, Homo sapiens
agatgccgattggcttgcgagagtcg

SEQ ID NO: 8344 - DNA, 26 bp, Homo sapiens
gatgccgattggcttgcgagagtcga

SEQ ID NO: 8345 - DNA, 26 bp, Homo sapiens
atgccgattggcttgcgagagtcgaa

SEQ ID NO: 8346 - DNA, 26 bp, Homo sapiens
tgccgattggcttgcgagagtcgaag

SEQ ID NO: 8347 - DNA, 26 bp, Homo sapiens
gccgattggcttgcgagagtcgaagg

SEQ ID NO: 8348 - DNA, 26 bp, Homo sapiens
ccgattggcttgcgagagtcgaaggg

SEQ ID NO: 8349 - DNA, 26 bp, Homo sapiens
cgattggcttgcgagagtcgaagggg

SEQ ID NO: 8350 - DNA, 26 bp, Homo sapiens
gattggcttgcgagagtcgaaggggt

SEQ ID NO: 8351 - DNA, 26 bp, Homo sapiens
attggcttgcgagagtcgaaggggtg

SEQ ID NO: 8352 - DNA, 26 bp, Homo sapiens
ttggcttgcgagagtcgaaggggtga

SEQ ID NO: 8353 - DNA, 26 bp, Homo sapiens
tggcttgcgagagtcgaaggggtgac

SEQ ID NO: 8354 - DNA, 26 bp, Homo sapiens
ggcttgcgagagtcgaaggggtgaca

SEQ ID NO: 8355 - DNA, 26 bp, Homo sapiens
gcttgcgagagtcgaaggggtgacac

SEQ ID NO: 8356 - DNA, 26 bp, Homo sapiens
cttgcgagagtcgaaggggtgacact

SEQ ID NO: 8357 - DNA, 26 bp, Homo sapiens
ttgcgagagtcgaaggggtgacactc

SEQ ID NO: 8358 - DNA, 26 bp, Homo sapiens
tgcgagagtcgaaggggtgacactcg

SEQ ID NO: 8359 - DNA, 26 bp, Homo sapiens
gcgagagtcgaaggggtgacactcgt

SEQ ID NO: 8360 - DNA, 26 bp, Homo sapiens
cgagagtcgaaggggtgacactcgtt

SEQ ID NO: 8361 - DNA, 26 bp, Homo sapiens
gagagtcgaaggggtgacactcgttt

SEQ ID NO: 8362 - DNA, 26 bp, Homo sapiens
agagtcgaaggggtgacactcgtttc

SEQ ID NO: 8363 - DNA, 26 bp, Homo sapiens
gagtcgaaggggtgacactcgtttcg

SEQ ID NO: 8364 - DNA, 26 bp, Homo sapiens
agtcgaaggggtgacactcgtttcgt

SEQ ID NO: 8365 - DNA, 26 bp, Homo sapiens
gtcgaaggggtgacactcgtttcgtg

SEQ ID NO: 8366 - DNA, 26 bp, Homo sapiens
tcgaaggggtgacactcgtttcgtga

SEQ ID NO: 8367 - DNA, 26 bp, Homo sapiens
cgaaggggtgacactcgtttcgtgac

SEQ ID NO: 8368 - DNA, 26 bp, Homo sapiens
gaaggggtgacactcgtttcgtgaca

SEQ ID NO: 8369 - DNA, 26 bp, Homo sapiens
aaggggtgacactcgtttcgtgacag

SEQ ID NO: 8370 - DNA, 26 bp, Homo sapiens
aggggtgacactcgtttcgtgacagg

SEQ ID NO: 8371 - DNA, 26 bp, Homo sapiens
ggggtgacactcgtttcgtgacaggt

SEQ ID NO: 8372 - DNA, 26 bp, Homo sapiens
gggtgacactcgtttcgtgacaggtg

SEQ ID NO: 8373 - DNA, 26 bp, Homo sapiens
ggtgacactcgtttcgtgacaggtga

SEQ ID NO: 8374 - DNA, 26 bp, Homo sapiens
gtgacactcgtttcgtgacaggtgaa

SEQ ID NO: 8375 - DNA, 26 bp, Homo sapiens
tgacactcgtttcgtgacaggtgaac

SEQ ID NO: 8376 - DNA, 26 bp, Homo sapiens
gacactcgtttcgtgacaggtgaacc

SEQ ID NO: 8377 - DNA, 26 bp, Homo sapiens
acactcgtttcgtgacaggtgaacct

SEQ ID NO: 8378 - DNA, 26 bp, Homo sapiens
cactcgtttcgtgacaggtgaacctt

SEQ ID NO: 8379 - DNA, 26 bp, Homo sapiens
actcgtttcgtgacaggtgaaccttg

SEQ ID NO: 8380 - DNA, 26 bp, Homo sapiens
ctcgtttcgtgacaggtgaaccttgc

SEQ ID NO: 8381 - DNA, 26 bp, Homo sapiens
tcgtttcgtgacaggtgaaccttgcc

SEQ ID NO: 8382 - DNA, 26 bp, Homo sapiens
cgtttcgtgacaggtgaaccttgccc

SEQ ID NO: 8383 - DNA, 26 bp, Homo sapiens
gtttcgtgacaggtgaaccttgcccc

SEQ ID NO: 8384 - DNA, 26 bp, Homo sapiens
tttcgtgacaggtgaaccttgccccc

SEQ ID NO: 8385 - DNA, 26 bp, Homo sapiens
ttcgtgacaggtgaaccttgcccccg

SEQ ID NO: 8386 - DNA, 26 bp, Homo sapiens
tcgtgacaggtgaaccttgcccccga

SEQ ID NO: 8387 - DNA, 26 bp, Homo sapiens
cgtgacaggtgaaccttgcccccgaa

SEQ ID NO: 8388 - DNA, 26 bp, Homo sapiens
gtgacaggtgaaccttgcccccgaaa

SEQ ID NO: 8389 - DNA, 26 bp, Homo sapiens
tgacaggtgaaccttgcccccgaaag

SEQ ID NO: 8390 - DNA, 26 bp, Homo sapiens
gacaggtgaaccttgcccccgaaagg

SEQ ID NO: 8391 - DNA, 26 bp, Homo sapiens
acaggtgaaccttgcccccgaaagga

SEQ ID NO: 8392 - DNA, 26 bp, Homo sapiens
caggtgaaccttgcccccgaaaggac

SEQ ID NO: 8393 - DNA, 26 bp, Homo sapiens
aggtgaaccttgcccccgaaaggact

SEQ ID NO: 8394 - DNA, 26 bp, Homo sapiens
ggtgaaccttgcccccgaaaggactg

SEQ ID NO: 8395 - DNA, 26 bp, Homo sapiens
gtgaaccttgcccccgaaaggactgc

SEQ ID NO: 8396 - DNA, 26 bp, Homo sapiens
tgaaccttgcccccgaaaggactgcc

SEQ ID NO: 8397 - DNA, 26 bp, Homo sapiens
gaaccttgcccccgaaaggactgccg

SEQ ID NO: 8398 - DNA, 26 bp, Homo sapiens
aaccttgcccccgaaaggactgccgg

SEQ ID NO: 8399 - DNA, 26 bp, Homo sapiens
accttgcccccgaaaggactgccggg

SEQ ID NO: 8400 - DNA, 26 bp, Homo sapiens
ccttgcccccgaaaggactgccgggc

SEQ ID NO: 8401 - DNA, 26 bp, Homo sapiens
cttgcccccgaaaggactgccgggct

SEQ ID NO: 8402 - DNA, 26 bp, Homo sapiens
ttgcccccgaaaggactgccgggctt

SEQ ID NO: 8403 - DNA, 26 bp, Homo sapiens
tgcccccgaaaggactgccgggcttc

SEQ ID NO: 8404 - DNA, 26 bp, Homo sapiens
gcccccgaaaggactgccgggcttca

SEQ ID NO: 8405 - DNA, 26 bp, Homo sapiens
cccccgaaaggactgccgggcttcaa

SEQ ID NO: 8406 - DNA, 26 bp, Homo sapiens
ccccgaaaggactgccgggcttcaaa

SEQ ID NO: 8407 - DNA, 26 bp, Homo sapiens
cccgaaaggactgccgggcttcaaac

SEQ ID NO: 8408 - DNA, 26 bp, Homo sapiens
ccgaaaggactgccgggcttcaaact

SEQ ID NO: 8409 - DNA, 26 bp, Homo sapiens
cgaaaggactgccgggcttcaaactt

SEQ ID NO: 8410 - DNA, 26 bp, Homo sapiens
gaaaggactgccgggcttcaaacttg

SEQ ID NO: 8411 - DNA, 26 bp, Homo sapiens
aaaggactgccgggcttcaaacttgg

SEQ ID NO: 8412 - DNA, 26 bp, Homo sapiens
aaggactgccgggcttcaaacttggg

SEQ ID NO: 8413 - DNA, 26 bp, Homo sapiens
aggactgccgggcttcaaacttggga

SEQ ID NO: 8414 - DNA, 26 bp, Homo sapiens
ggactgccgggcttcaaacttgggaa

SEQ ID NO: 8415 - DNA, 26 bp, Homo sapiens
gactgccgggcttcaaacttgggaaa

SEQ ID NO: 8416 - DNA, 26 bp, Homo sapiens
actgccgggcttcaaacttgggaaac

SEQ ID NO: 8417 - DNA, 26 bp, Homo sapiens
ctgccgggcttcaaacttgggaaacc

SEQ ID NO: 8418 - DNA, 26 bp, Homo sapiens
tgccgggcttcaaacttgggaaaccc

SEQ ID NO: 8419 - DNA, 26 bp, Homo sapiens
gccgggcttcaaacttgggaaacccg

SEQ ID NO: 8420 - DNA, 26 bp, Homo sapiens
ccgggcttcaaacttgggaaacccga

SEQ ID NO: 8421 - DNA, 26 bp, Homo sapiens
cgggcttcaaacttgggaaacccgag

SEQ ID NO: 8422 - DNA, 26 bp, Homo sapiens
gggcttcaaacttgggaaacccgagg

SEQ ID NO: 8423 - DNA, 26 bp, Homo sapiens
ggcttcaaacttgggaaacccgaggt

SEQ ID NO: 8424 - DNA, 26 bp, Homo sapiens
gcttcaaacttgggaaacccgaggtc

SEQ ID NO: 8425 - DNA, 26 bp, Homo sapiens
cttcaaacttgggaaacccgaggtca

SEQ ID NO: 8426 - DNA, 26 bp, Homo sapiens
ttcaaacttgggaaacccgaggtcac

SEQ ID NO: 8427 - DNA, 26 bp, Homo sapiens
tcaaacttgggaaacccgaggtcaca

SEQ ID NO: 8428 - DNA, 26 bp, Homo sapiens
caaacttgggaaacccgaggtcacat

SEQ ID NO: 8429 - DNA, 26 bp, Homo sapiens
aaacttgggaaacccgaggtcacatg

SEQ ID NO: 8430 - DNA, 26 bp, Homo sapiens
aacttgggaaacccgaggtcacatga

SEQ ID NO: 8431 - DNA, 26 bp, Homo sapiens
acttgggaaacccgaggtcacatgac

SEQ ID NO: 8432 - DNA, 26 bp, Homo sapiens
cttgggaaacccgaggtcacatgact

SEQ ID NO: 8433 - DNA, 26 bp, Homo sapiens
ttgggaaacccgaggtcacatgacta

SEQ ID NO: 8434 - DNA, 26 bp, Homo sapiens
tgggaaacccgaggtcacatgactag

SEQ ID NO: 8435 - DNA, 26 bp, Homo sapiens
gggaaacccgaggtcacatgactagc

SEQ ID NO: 8436 - DNA, 26 bp, Homo sapiens
ggaaacccgaggtcacatgactagcc

SEQ ID NO: 8437 - DNA, 26 bp, Homo sapiens
gaaacccgaggtcacatgactagcca

SEQ ID NO: 8438 - DNA, 26 bp, Homo sapiens
aaacccgaggtcacatgactagccag

SEQ ID NO: 8439 - DNA, 26 bp, Homo sapiens
aacccgaggtcacatgactagccagt

SEQ ID NO: 8440 - DNA, 26 bp, Homo sapiens
acccgaggtcacatgactagccagtc

SEQ ID NO: 8441 - DNA, 26 bp, Homo sapiens
cccgaggtcacatgactagccagtcc

SEQ ID NO: 8442 - DNA, 26 bp, Homo sapiens
ccgaggtcacatgactagccagtcct

SEQ ID NO: 8443 - DNA, 26 bp, Homo sapiens
cgaggtcacatgactagccagtccta

SEQ ID NO: 8444 - DNA, 26 bp, Homo sapiens
gaggtcacatgactagccagtcctag

SEQ ID NO: 8445 - DNA, 26 bp, Homo sapiens
aggtcacatgactagccagtcctagg

SEQ ID NO: 8446 - DNA, 26 bp, Homo sapiens
ggtcacatgactagccagtcctaggg

SEQ ID NO: 8447 - DNA, 26 bp, Homo sapiens
gtcacatgactagccagtcctagggg

SEQ ID NO: 8448 - DNA, 26 bp, Homo sapiens
tcacatgactagccagtcctaggggg

SEQ ID NO: 8449 - DNA, 26 bp, Homo sapiens
cacatgactagccagtcctagggggc

SEQ ID NO: 8450 - DNA, 26 bp, Homo sapiens
acatgactagccagtcctagggggcc

SEQ ID NO: 8451 - DNA, 26 bp, Homo sapiens
catgactagccagtcctagggggccg

SEQ ID NO: 8452 - DNA, 26 bp, Homo sapiens
atgactagccagtcctagggggccgc

SEQ ID NO: 8453 - DNA, 26 bp, Homo sapiens
tgactagccagtcctagggggccgcc

SEQ ID NO: 8454 - DNA, 26 bp, Homo sapiens
gactagccagtcctagggggccgcca

SEQ ID NO: 8455 - DNA, 26 bp, Homo sapiens
actagccagtcctagggggccgccat

SEQ ID NO: 8456 - DNA, 26 bp, Homo sapiens
ctagccagtcctagggggccgccatc

SEQ ID NO: 8457 - DNA, 26 bp, Homo sapiens
tagccagtcctagggggccgccatct

SEQ ID NO: 8458 - DNA, 26 bp, Homo sapiens
agccagtcctagggggccgccatctt

SEQ ID NO: 8459 - DNA, 26 bp, Homo sapiens
gccagtcctagggggccgccatcttg

SEQ ID NO: 8460 - DNA, 26 bp, Homo sapiens
ccagtcctagggggccgccatcttga

SEQ ID NO: 8461 - DNA, 26 bp, Homo sapiens
cagtcctagggggccgccatcttgat

SEQ ID NO: 8462 - DNA, 26 bp, Homo sapiens
agtcctagggggccgccatcttgata

SEQ ID NO: 8463 - DNA, 26 bp, Homo sapiens
gtcctagggggccgccatcttgatac

SEQ ID NO: 8464 - DNA, 26 bp, Homo sapiens
tcctagggggccgccatcttgatact

SEQ ID NO: 8465 - DNA, 26 bp, Homo sapiens
cctagggggccgccatcttgatacta

SEQ ID NO: 8466 - DNA, 26 bp, Homo sapiens
ctagggggccgccatcttgatactac

SEQ ID NO: 8467 - DNA, 26 bp, Homo sapiens
tagggggccgccatcttgatactact

SEQ ID NO: 8468 - DNA, 26 bp, Homo sapiens
agggggccgccatcttgatactactg

SEQ ID NO: 8469 - DNA, 26 bp, Homo sapiens
gggggccgccatcttgatactactgc

SEQ ID NO: 8470 - DNA, 26 bp, Homo sapiens
ggggccgccatcttgatactactgct

SEQ ID NO: 8471 - DNA, 26 bp, Homo sapiens
gggccgccatcttgatactactgctt

SEQ ID NO: 8472 - DNA, 26 bp, Homo sapiens
ggccgccatcttgatactactgcttg

SEQ ID NO: 8473 - DNA, 26 bp, Homo sapiens
gccgccatcttgatactactgcttgc

SEQ ID NO: 8474 - DNA, 26 bp, Homo sapiens
ccgccatcttgatactactgcttgcc

SEQ ID NO: 8475 - DNA, 26 bp, Homo sapiens
cgccatcttgatactactgcttgcca

SEQ ID NO: 8476 - DNA, 26 bp, Homo sapiens
gccatcttgatactactgcttgccag

SEQ ID NO: 8477 - DNA, 26 bp, Homo sapiens
ccatcttgatactactgcttgccagc

SEQ ID NO: 8478 - DNA, 26 bp, Homo sapiens
catcttgatactactgcttgccagct

SEQ ID NO: 8479 - DNA, 26 bp, Homo sapiens
atcttgatactactgcttgccagcta

SEQ ID NO: 8480 - DNA, 26 bp, Homo sapiens
tcttgatactactgcttgccagctag

SEQ ID NO: 8481 - DNA, 26 bp, Homo sapiens
cttgatactactgcttgccagctagt

SEQ ID NO: 8482 - DNA, 26 bp, Homo sapiens
ttgatactactgcttgccagctagtg

SEQ ID NO: 8483 - DNA, 26 bp, Homo sapiens
tgatactactgcttgccagctagtga

SEQ ID NO: 8484 - DNA, 26 bp, Homo sapiens
gatactactgcttgccagctagtgag

SEQ ID NO: 8485 - DNA, 26 bp, Homo sapiens
atactactgcttgccagctagtgagc

SEQ ID NO: 8486 - DNA, 26 bp, Homo sapiens
tactactgcttgccagctagtgagct

SEQ ID NO: 8487 - DNA, 26 bp, Homo sapiens
actactgcttgccagctagtgagctg

SEQ ID NO: 8488 - DNA, 26 bp, Homo sapiens
ctactgcttgccagctagtgagctgt

SEQ ID NO: 8489 - DNA, 26 bp, Homo sapiens
tactgcttgccagctagtgagctgtt

SEQ ID NO: 8490 - DNA, 26 bp, Homo sapiens
actgcttgccagctagtgagctgttg

SEQ ID NO: 8491 - DNA, 26 bp, Homo sapiens
ctgcttgccagctagtgagctgttgg

SEQ ID NO: 8492 - DNA, 26 bp, Homo sapiens
tgcttgccagctagtgagctgttggc

SEQ ID NO: 8493 - DNA, 26 bp, Homo sapiens
gcttgccagctagtgagctgttggcc

SEQ ID NO: 8494 - DNA, 26 bp, Homo sapiens
cttgccagctagtgagctgttggccg

SEQ ID NO: 8495 - DNA, 26 bp, Homo sapiens
ttgccagctagtgagctgttggccgg

SEQ ID NO: 8496 - DNA, 26 bp, Homo sapiens
tgccagctagtgagctgttggccggg

SEQ ID NO: 8497 - DNA, 26 bp, Homo sapiens
gccagctagtgagctgttggccgggt

SEQ ID NO: 8498 - DNA, 26 bp, Homo sapiens
ccagctagtgagctgttggccgggtg

SEQ ID NO: 8499 - DNA, 26 bp, Homo sapiens
cagctagtgagctgttggccgggtga

SEQ ID NO: 8500 - DNA, 26 bp, Homo sapiens
agctagtgagctgttggccgggtgag

SEQ ID NO: 8501 - DNA, 26 bp, Homo sapiens
gctagtgagctgttggccgggtgagg

SEQ ID NO: 8502 - DNA, 26 bp, Homo sapiens
ctagtgagctgttggccgggtgaggc

SEQ ID NO: 8503 - DNA, 26 bp, Homo sapiens
tagtgagctgttggccgggtgaggcc

SEQ ID NO: 8504 - DNA, 26 bp, Homo sapiens
agtgagctgttggccgggtgaggccc

SEQ ID NO: 8505 - DNA, 26 bp, Homo sapiens
gtgagctgttggccgggtgaggccca

SEQ ID NO: 8506 - DNA, 26 bp, Homo sapiens
tgagctgttggccgggtgaggcccaa

SEQ ID NO: 8507 - DNA, 26 bp, Homo sapiens
gagctgttggccgggtgaggcccaaa

SEQ ID NO: 8508 - DNA, 26 bp, Homo sapiens
agctgttggccgggtgaggcccaaaa

SEQ ID NO: 8509 - DNA, 26 bp, Homo sapiens
gctgttggccgggtgaggcccaaaac

SEQ ID NO: 8510 - DNA, 26 bp, Homo sapiens
ctgttggccgggtgaggcccaaaaca

SEQ ID NO: 8511 - DNA, 26 bp, Homo sapiens
tgttggccgggtgaggcccaaaacag

SEQ ID NO: 8512 - DNA, 26 bp, Homo sapiens
gttggccgggtgaggcccaaaacaga

SEQ ID NO: 8513 - DNA, 26 bp, Homo sapiens
ttggccgggtgaggcccaaaacagag

SEQ ID NO: 8514 - DNA, 26 bp, Homo sapiens
tggccgggtgaggcccaaaacagagc

SEQ ID NO: 8515 - DNA, 26 bp, Homo sapiens
ggccgggtgaggcccaaaacagagca

SEQ ID NO: 8516 - DNA, 26 bp, Homo sapiens
gccgggtgaggcccaaaacagagcag

SEQ ID NO: 8517 - DNA, 26 bp, Homo sapiens
ccgggtgaggcccaaaacagagcagc

SEQ ID NO: 8518 - DNA, 26 bp, Homo sapiens
cgggtgaggcccaaaacagagcagca

SEQ ID NO: 8519 - DNA, 26 bp, Homo sapiens
gggtgaggcccaaaacagagcagcag

SEQ ID NO: 8520 - DNA, 26 bp, Homo sapiens
ggtgaggcccaaaacagagcagcagt

SEQ ID NO: 8521 - DNA, 26 bp, Homo sapiens
gtgaggcccaaaacagagcagcagtt

SEQ ID NO: 8522 - DNA, 26 bp, Homo sapiens
tgaggcccaaaacagagcagcagttt

SEQ ID NO: 8523 - DNA, 26 bp, Homo sapiens
gaggcccaaaacagagcagcagtttc

SEQ ID NO: 8524 - DNA, 26 bp, Homo sapiens
aggcccaaaacagagcagcagtttca

SEQ ID NO: 8525 - DNA, 26 bp, Homo sapiens
ggcccaaaacagagcagcagtttcag

SEQ ID NO: 8526 - DNA, 26 bp, Homo sapiens
gcccaaaacagagcagcagtttcagg

SEQ ID NO: 8527 - DNA, 26 bp, Homo sapiens
cccaaaacagagcagcagtttcagga

SEQ ID NO: 8528 - DNA, 26 bp, Homo sapiens
ccaaaacagagcagcagtttcaggaa

SEQ ID NO: 8529 - DNA, 26 bp, Homo sapiens
caaaacagagcagcagtttcaggaaa

SEQ ID NO: 8530 - DNA, 26 bp, Homo sapiens
aaaacagagcagcagtttcaggaaac

SEQ ID NO: 8531 - DNA, 26 bp, Homo sapiens
aaacagagcagcagtttcaggaaact

SEQ ID NO: 8532 - DNA, 26 bp, Homo sapiens
aacagagcagcagtttcaggaaactt

SEQ ID NO: 8533 - DNA, 26 bp, Homo sapiens
acagagcagcagtttcaggaaacttg

SEQ ID NO: 8534 - DNA, 26 bp, Homo sapiens
cagagcagcagtttcaggaaacttgt

SEQ ID NO: 8535 - DNA, 26 bp, Homo sapiens
agagcagcagtttcaggaaacttgta

SEQ ID NO: 8536 - DNA, 26 bp, Homo sapiens
gagcagcagtttcaggaaacttgtat

SEQ ID NO: 8537 - DNA, 26 bp, Homo sapiens
agcagcagtttcaggaaacttgtatc

SEQ ID NO: 8538 - DNA, 26 bp, Homo sapiens
gcagcagtttcaggaaacttgtatct

SEQ ID NO: 8539 - DNA, 26 bp, Homo sapiens
cagcagtttcaggaaacttgtatctc

SEQ ID NO: 8540 - DNA, 26 bp, Homo sapiens
agcagtttcaggaaacttgtatctcg

SEQ ID NO: 8541 - DNA, 26 bp, Homo sapiens
gcagtttcaggaaacttgtatctcga

SEQ ID NO: 8542 - DNA, 26 bp, Homo sapiens
cagtttcaggaaacttgtatctcgac

SEQ ID NO: 8543 - DNA, 26 bp, Homo sapiens
agtttcaggaaacttgtatctcgacc

SEQ ID NO: 8544 - DNA, 26 bp, Homo sapiens
gtttcaggaaacttgtatctcgacca

SEQ ID NO: 8545 - DNA, 26 bp, Homo sapiens
tttcaggaaacttgtatctcgaccag

SEQ ID NO: 8546 - DNA, 26 bp, Homo sapiens
ttcaggaaacttgtatctcgaccagg

SEQ ID NO: 8547 - DNA, 26 bp, Homo sapiens
tcaggaaacttgtatctcgaccagga

SEQ ID NO: 8548 - DNA, 26 bp, Homo sapiens
caggaaacttgtatctcgaccaggaa

SEQ ID NO: 8549 - DNA, 26 bp, Homo sapiens
aggaaacttgtatctcgaccaggaag

SEQ ID NO: 8550 - DNA, 26 bp, Homo sapiens
ggaaacttgtatctcgaccaggaagc

SEQ ID NO: 8551 - DNA, 26 bp, Homo sapiens
gaaacttgtatctcgaccaggaagca

SEQ ID NO: 8552 - DNA, 26 bp, Homo sapiens
aaacttgtatctcgaccaggaagcac

SEQ ID NO: 8553 - DNA, 26 bp, Homo sapiens
aacttgtatctcgaccaggaagcacc

SEQ ID NO: 8554 - DNA, 26 bp, Homo sapiens
acttgtatctcgaccaggaagcacca

SEQ ID NO: 8555 - DNA, 26 bp, Homo sapiens
cttgtatctcgaccaggaagcaccag

SEQ ID NO: 8556 - DNA, 26 bp, Homo sapiens
ttgtatctcgaccaggaagcaccagt

SEQ ID NO: 8557 - DNA, 26 bp, Homo sapiens
tgtatctcgaccaggaagcaccagta

SEQ ID NO: 8558 - DNA, 26 bp, Homo sapiens
gtatctcgaccaggaagcaccagtag

SEQ ID NO: 8559 - DNA, 26 bp, Homo sapiens
tatctcgaccaggaagcaccagtaga

SEQ ID NO: 8560 - DNA, 26 bp, Homo sapiens
atctcgaccaggaagcaccagtagat

SEQ ID NO: 8561 - DNA, 26 bp, Homo sapiens
tctcgaccaggaagcaccagtagatg

SEQ ID NO: 8562 - DNA, 26 bp, Homo sapiens
ctcgaccaggaagcaccagtagatgg

SEQ ID NO: 8563 - DNA, 26 bp, Homo sapiens
tcgaccaggaagcaccagtagatggg

SEQ ID NO: 8564 - DNA, 26 bp, Homo sapiens
cgaccaggaagcaccagtagatggga

SEQ ID NO: 8565 - DNA, 26 bp, Homo sapiens
gaccaggaagcaccagtagatgggat

SEQ ID NO: 8566 - DNA, 26 bp, Homo sapiens
accaggaagcaccagtagatgggatg

SEQ ID NO: 8567 - DNA, 26 bp, Homo sapiens
ccaggaagcaccagtagatgggatgt

SEQ ID NO: 8568 - DNA, 26 bp, Homo sapiens
caggaagcaccagtagatgggatgtt

SEQ ID NO: 8569 - DNA, 26 bp, Homo sapiens
aggaagcaccagtagatgggatgttg

SEQ ID NO: 8570 - DNA, 26 bp, Homo sapiens
ggaagcaccagtagatgggatgttgc

SEQ ID NO: 8571 - DNA, 26 bp, Homo sapiens
gaagcaccagtagatgggatgttgct

SEQ ID NO: 8572 - DNA, 26 bp, Homo sapiens
aagcaccagtagatgggatgttgctg

SEQ ID NO: 8573 - DNA, 26 bp, Homo sapiens
agcaccagtagatgggatgttgctga

SEQ ID NO: 8574 - DNA, 26 bp, Homo sapiens
gcaccagtagatgggatgttgctgaa

SEQ ID NO: 8575 - DNA, 26 bp, Homo sapiens
caccagtagatgggatgttgctgaaa

SEQ ID NO: 8576 - DNA, 26 bp, Homo sapiens
accagtagatgggatgttgctgaaaa

SEQ ID NO: 8577 - DNA, 26 bp, Homo sapiens
ccagtagatgggatgttgctgaaaat

SEQ ID NO: 8578 - DNA, 26 bp, Homo sapiens
cagtagatgggatgttgctgaaaatg

SEQ ID NO: 8579 - DNA, 26 bp, Homo sapiens
agtagatgggatgttgctgaaaatgg

SEQ ID NO: 8580 - DNA, 26 bp, Homo sapiens
gtagatgggatgttgctgaaaatgga

SEQ ID NO: 8581 - DNA, 26 bp, Homo sapiens
tagatgggatgttgctgaaaatggag

SEQ ID NO: 8582 - DNA, 26 bp, Homo sapiens
agatgggatgttgctgaaaatggagg

SEQ ID NO: 8583 - DNA, 26 bp, Homo sapiens
gatgggatgttgctgaaaatggaggt

SEQ ID NO: 8584 - DNA, 26 bp, Homo sapiens
atgggatgttgctgaaaatggaggtt

SEQ ID NO: 8585 - DNA, 26 bp, Homo sapiens
tgggatgttgctgaaaatggaggttg

SEQ ID NO: 8586 - DNA, 26 bp, Homo sapiens
gggatgttgctgaaaatggaggttgt

SEQ ID NO: 8587 - DNA, 26 bp, Homo sapiens
ggatgttgctgaaaatggaggttgtg

SEQ ID NO: 8588 - DNA, 26 bp, Homo sapiens
gatgttgctgaaaatggaggttgtga

SEQ ID NO: 8589 - DNA, 26 bp, Homo sapiens
atgttgctgaaaatggaggttgtgaa

SEQ ID NO: 8590 - DNA, 26 bp, Homo sapiens
tgttgctgaaaatggaggttgtgaat

SEQ ID NO: 8591 - DNA, 26 bp, Homo sapiens
gttgctgaaaatggaggttgtgaatg

SEQ ID NO: 8592 - DNA, 26 bp, Homo sapiens
ttgctgaaaatggaggttgtgaatga

SEQ ID NO: 8593 - DNA, 26 bp, Homo sapiens
tgctgaaaatggaggttgtgaatgaa

SEQ ID NO: 8594 - DNA, 26 bp, Homo sapiens
gctgaaaatggaggttgtgaatgaag

SEQ ID NO: 8595 - DNA, 26 bp, Homo sapiens
ctgaaaatggaggttgtgaatgaagc

SEQ ID NO: 8596 - DNA, 26 bp, Homo sapiens
tgaaaatggaggttgtgaatgaagca

SEQ ID NO: 8597 - DNA, 26 bp, Homo sapiens
gaaaatggaggttgtgaatgaagcat

SEQ ID NO: 8598 - DNA, 26 bp, Homo sapiens
aaaatggaggttgtgaatgaagcatt

SEQ ID NO: 8599 - DNA, 26 bp, Homo sapiens
aaatggaggttgtgaatgaagcattc

SEQ ID NO: 8600 - DNA, 26 bp, Homo sapiens
aatggaggttgtgaatgaagcattcc

SEQ ID NO: 8601 - DNA, 26 bp, Homo sapiens
atggaggttgtgaatgaagcattcca

SEQ ID NO: 8602 - DNA, 26 bp, Homo sapiens
tggaggttgtgaatgaagcattccag

SEQ ID NO: 8603 - DNA, 26 bp, Homo sapiens
ggaggttgtgaatgaagcattccagg

SEQ ID NO: 8604 - DNA, 26 bp, Homo sapiens
gaggttgtgaatgaagcattccagga

SEQ ID NO: 8605 - DNA, 26 bp, Homo sapiens
aggttgtgaatgaagcattccaggag

SEQ ID NO: 8606 - DNA, 26 bp, Homo sapiens
ggttgtgaatgaagcattccaggagg

SEQ ID NO: 8607 - DNA, 26 bp, Homo sapiens
gttgtgaatgaagcattccaggaggg

SEQ ID NO: 8608 - DNA, 26 bp, Homo sapiens
ttgtgaatgaagcattccaggaggga

SEQ ID NO: 8609 - DNA, 26 bp, Homo sapiens
tgtgaatgaagcattccaggagggag

SEQ ID NO: 8610 - DNA, 26 bp, Homo sapiens
gtgaatgaagcattccaggagggagc

SEQ ID NO: 8611 - DNA, 26 bp, Homo sapiens
tgaatgaagcattccaggagggagct

SEQ ID NO: 8612 - DNA, 26 bp, Homo sapiens
gaatgaagcattccaggagggagctt

SEQ ID NO: 8613 - DNA, 26 bp, Homo sapiens
aatgaagcattccaggagggagctta

SEQ ID NO: 8614 - DNA, 26 bp, Homo sapiens
atgaagcattccaggagggagcttac

SEQ ID NO: 8615 - DNA, 26 bp, Homo sapiens
tgaagcattccaggagggagcttact

SEQ ID NO: 8616 - DNA, 26 bp, Homo sapiens
gaagcattccaggagggagcttactt

SEQ ID NO: 8617 - DNA, 26 bp, Homo sapiens
aagcattccaggagggagcttacttt

SEQ ID NO: 8618 - DNA, 26 bp, Homo sapiens
agcattccaggagggagcttactttc

SEQ ID NO: 8619 - DNA, 26 bp, Homo sapiens
gcattccaggagggagcttactttcc

SEQ ID NO: 8620 - DNA, 26 bp, Homo sapiens
cattccaggagggagcttactttccc

SEQ ID NO: 8621 - DNA, 26 bp, Homo sapiens
attccaggagggagcttactttcccc

SEQ ID NO: 8622 - DNA, 26 bp, Homo sapiens
ttccaggagggagcttactttcccca

SEQ ID NO: 8623 - DNA, 26 bp, Homo sapiens
tccaggagggagcttactttccccat

SEQ ID NO: 8624 - DNA, 26 bp, Homo sapiens
ccaggagggagcttactttccccatc

SEQ ID NO: 8625 - DNA, 26 bp, Homo sapiens
caggagggagcttactttccccatcc

SEQ ID NO: 8626 - DNA, 26 bp, Homo sapiens
aggagggagcttactttccccatcca

SEQ ID NO: 8627 - DNA, 26 bp, Homo sapiens
ggagggagcttactttccccatccag

SEQ ID NO: 8628 - DNA, 26 bp, Homo sapiens
gagggagcttactttccccatccagg

SEQ ID NO: 8629 - DNA, 26 bp, Homo sapiens
agggagcttactttccccatccaggt

SEQ ID NO: 8630 - DNA, 26 bp, Homo sapiens
gggagcttactttccccatccaggtt

SEQ ID NO: 8631 - DNA, 26 bp, Homo sapiens
ggagcttactttccccatccaggtta

SEQ ID NO: 8632 - DNA, 26 bp, Homo sapiens
gagcttactttccccatccaggttat

SEQ ID NO: 8633 - DNA, 26 bp, Homo sapiens
agcttactttccccatccaggttatt

SEQ ID NO: 8634 - DNA, 26 bp, Homo sapiens
gcttactttccccatccaggttattg

SEQ ID NO: 8635 - DNA, 26 bp, Homo sapiens
cttactttccccatccaggttattgg

SEQ ID NO: 8636 - DNA, 26 bp, Homo sapiens
ttactttccccatccaggttattggc

SEQ ID NO: 8637 - DNA, 26 bp, Homo sapiens
tactttccccatccaggttattggca

SEQ ID NO: 8638 - DNA, 26 bp, Homo sapiens
actttccccatccaggttattggcac

SEQ ID NO: 8639 - DNA, 26 bp, Homo sapiens
ctttccccatccaggttattggcacc

SEQ ID NO: 8640 - DNA, 26 bp, Homo sapiens
tttccccatccaggttattggcacca

SEQ ID NO: 8641 - DNA, 26 bp, Homo sapiens
ttccccatccaggttattggcaccat

SEQ ID NO: 8642 - DNA, 26 bp, Homo sapiens
tccccatccaggttattggcaccatc

SEQ ID NO: 8643 - DNA, 26 bp, Homo sapiens
ccccatccaggttattggcaccatca

SEQ ID NO: 8644 - DNA, 26 bp, Homo sapiens
cccatccaggttattggcaccatcat

SEQ ID NO: 8645 - DNA, 26 bp, Homo sapiens
ccatccaggttattggcaccatcatc

SEQ ID NO: 8646 - DNA, 26 bp, Homo sapiens
catccaggttattggcaccatcatcc

SEQ ID NO: 8647 - DNA, 26 bp, Homo sapiens
atccaggttattggcaccatcatcca

SEQ ID NO: 8648 - DNA, 26 bp, Homo sapiens
tccaggttattggcaccatcatccac

SEQ ID NO: 8649 - DNA, 26 bp, Homo sapiens
ccaggttattggcaccatcatccact

SEQ ID NO: 8650 - DNA, 26 bp, Homo sapiens
caggttattggcaccatcatccacta

SEQ ID NO: 8651 - DNA, 26 bp, Homo sapiens
aggttattggcaccatcatccactag

SEQ ID NO: 8652 - DNA, 26 bp, Homo sapiens
ggttattggcaccatcatccactagc

SEQ ID NO: 8653 - DNA, 26 bp, Homo sapiens
gttattggcaccatcatccactagct

SEQ ID NO: 8654 - DNA, 26 bp, Homo sapiens
ttattggcaccatcatccactagctc

SEQ ID NO: 8655 - DNA, 26 bp, Homo sapiens
tattggcaccatcatccactagctct

SEQ ID NO: 8656 - DNA, 26 bp, Homo sapiens
attggcaccatcatccactagctctc

SEQ ID NO: 8657 - DNA, 26 bp, Homo sapiens
ttggcaccatcatccactagctctcc

SEQ ID NO: 8658 - DNA, 26 bp, Homo sapiens
tggcaccatcatccactagctctccc

SEQ ID NO: 8659 - DNA, 26 bp, Homo sapiens
ggcaccatcatccactagctctcccg

SEQ ID NO: 8660 - DNA, 26 bp, Homo sapiens
gcaccatcatccactagctctcccgc

SEQ ID NO: 8661 - DNA, 26 bp, Homo sapiens
caccatcatccactagctctcccgca

SEQ ID NO: 8662 - DNA, 26 bp, Homo sapiens
accatcatccactagctctcccgcac

SEQ ID NO: 8663 - DNA, 26 bp, Homo sapiens
ccatcatccactagctctcccgcacc

SEQ ID NO: 8664 - DNA, 26 bp, Homo sapiens
catcatccactagctctcccgcacca

SEQ ID NO: 8665 - DNA, 26 bp, Homo sapiens
atcatccactagctctcccgcaccag

SEQ ID NO: 8666 - DNA, 26 bp, Homo sapiens
tcatccactagctctcccgcaccaga

SEQ ID NO: 8667 - DNA, 26 bp, Homo sapiens
catccactagctctcccgcaccagaa

SEQ ID NO: 8668 - DNA, 26 bp, Homo sapiens
atccactagctctcccgcaccagaaa

SEQ ID NO: 8669 - DNA, 26 bp, Homo sapiens
tccactagctctcccgcaccagaaag

SEQ ID NO: 8670 - DNA, 26 bp, Homo sapiens
ccactagctctcccgcaccagaaagc

SEQ ID NO: 8671 - DNA, 26 bp, Homo sapiens
cactagctctcccgcaccagaaagca

SEQ ID NO: 8672 - DNA, 26 bp, Homo sapiens
actagctctcccgcaccagaaagcag

SEQ ID NO: 8673 - DNA, 26 bp, Homo sapiens
ctagctctcccgcaccagaaagcagg

SEQ ID NO: 8674 - DNA, 26 bp, Homo sapiens
tagctctcccgcaccagaaagcaggg

SEQ ID NO: 8675 - DNA, 26 bp, Homo sapiens
agctctcccgcaccagaaagcaggga

SEQ ID NO: 8676 - DNA, 26 bp, Homo sapiens
gctctcccgcaccagaaagcagggag

SEQ ID NO: 8677 - DNA, 26 bp, Homo sapiens
ctctcccgcaccagaaagcagggagg

SEQ ID NO: 8678 - DNA, 26 bp, Homo sapiens
tctcccgcaccagaaagcagggagga

SEQ ID NO: 8679 - DNA, 26 bp, Homo sapiens
ctcccgcaccagaaagcagggaggat

SEQ ID NO: 8680 - DNA, 26 bp, Homo sapiens
tcccgcaccagaaagcagggaggatt

SEQ ID NO: 8681 - DNA, 26 bp, Homo sapiens
cccgcaccagaaagcagggaggattc

SEQ ID NO: 8682 - DNA, 26 bp, Homo sapiens
ccgcaccagaaagcagggaggattcc

SEQ ID NO: 8683 - DNA, 26 bp, Homo sapiens
cgcaccagaaagcagggaggattcct

SEQ ID NO: 8684 - DNA, 26 bp, Homo sapiens
gcaccagaaagcagggaggattcctc

SEQ ID NO: 8685 - DNA, 26 bp, Homo sapiens
caccagaaagcagggaggattcctca

SEQ ID NO: 8686 - DNA, 26 bp, Homo sapiens
accagaaagcagggaggattcctcag

SEQ ID NO: 8687 - DNA, 26 bp, Homo sapiens
ccagaaagcagggaggattcctcagt

SEQ ID NO: 8688 - DNA, 26 bp, Homo sapiens
cagaaagcagggaggattcctcagtc

SEQ ID NO: 8689 - DNA, 26 bp, Homo sapiens
agaaagcagggaggattcctcagtcc

SEQ ID NO: 8690 - DNA, 26 bp, Homo sapiens
gaaagcagggaggattcctcagtcca

SEQ ID NO: 8691 - DNA, 26 bp, Homo sapiens
aaagcagggaggattcctcagtccag

SEQ ID NO: 8692 - DNA, 26 bp, Homo sapiens
aagcagggaggattcctcagtccaga

SEQ ID NO: 8693 - DNA, 26 bp, Homo sapiens
agcagggaggattcctcagtccagag

SEQ ID NO: 8694 - DNA, 26 bp, Homo sapiens
gcagggaggattcctcagtccagagc

SEQ ID NO: 8695 - DNA, 26 bp, Homo sapiens
cagggaggattcctcagtccagagct

SEQ ID NO: 8696 - DNA, 26 bp, Homo sapiens
agggaggattcctcagtccagagcta

SEQ ID NO: 8697 - DNA, 26 bp, Homo sapiens
gggaggattcctcagtccagagctac

SEQ ID NO: 8698 - DNA, 26 bp, Homo sapiens
ggaggattcctcagtccagagctact

SEQ ID NO: 8699 - DNA, 26 bp, Homo sapiens
gaggattcctcagtccagagctacta

SEQ ID NO: 8700 - DNA, 26 bp, Homo sapiens
aggattcctcagtccagagctactag

SEQ ID NO: 8701 - DNA, 26 bp, Homo sapiens
ggattcctcagtccagagctactagt

SEQ ID NO: 8702 - DNA, 26 bp, Homo sapiens
gattcctcagtccagagctactagtc

SEQ ID NO: 8703 - DNA, 26 bp, Homo sapiens
attcctcagtccagagctactagtca

SEQ ID NO: 8704 - DNA, 26 bp, Homo sapiens
ttcctcagtccagagctactagtcac

SEQ ID NO: 8705 - DNA, 26 bp, Homo sapiens
tcctcagtccagagctactagtcaca

SEQ ID NO: 8706 - DNA, 26 bp, Homo sapiens
cctcagtccagagctactagtcacaa

SEQ ID NO: 8707 - DNA, 26 bp, Homo sapiens
ctcagtccagagctactagtcacaag

SEQ ID NO: 8708 - DNA, 26 bp, Homo sapiens
tcagtccagagctactagtcacaagt

SEQ ID NO: 8709 - DNA, 26 bp, Homo sapiens
cagtccagagctactagtcacaagtc

SEQ ID NO: 8710 - DNA, 26 bp, Homo sapiens
agtccagagctactagtcacaagtcc

SEQ ID NO: 8711 - DNA, 26 bp, Homo sapiens
gtccagagctactagtcacaagtcct

SEQ ID NO: 8712 - DNA, 26 bp, Homo sapiens
tccagagctactagtcacaagtcctg

SEQ ID NO: 8713 - DNA, 26 bp, Homo sapiens
ccagagctactagtcacaagtcctgt

SEQ ID NO: 8714 - DNA, 26 bp, Homo sapiens
cagagctactagtcacaagtcctgtc

SEQ ID NO: 8715 - DNA, 26 bp, Homo sapiens
agagctactagtcacaagtcctgtct

SEQ ID NO: 8716 - DNA, 26 bp, Homo sapiens
gagctactagtcacaagtcctgtctg

SEQ ID NO: 8717 - DNA, 26 bp, Homo sapiens
agctactagtcacaagtcctgtctgt

SEQ ID NO: 8718 - DNA, 26 bp, Homo sapiens
gctactagtcacaagtcctgtctgtc

SEQ ID NO: 8719 - DNA, 26 bp, Homo sapiens
ctactagtcacaagtcctgtctgtcc

SEQ ID NO: 8720 - DNA, 26 bp, Homo sapiens
tactagtcacaagtcctgtctgtccc

SEQ ID NO: 8721 - DNA, 26 bp, Homo sapiens
actagtcacaagtcctgtctgtcccg

SEQ ID NO: 8722 - DNA, 26 bp, Homo sapiens
ctagtcacaagtcctgtctgtcccgc

SEQ ID NO: 8723 - DNA, 26 bp, Homo sapiens
tagtcacaagtcctgtctgtcccgcc

SEQ ID NO: 8724 - DNA, 26 bp, Homo sapiens
agtcacaagtcctgtctgtcccgccc

SEQ ID NO: 8725 - DNA, 26 bp, Homo sapiens
gtcacaagtcctgtctgtcccgccct

SEQ ID NO: 8726 - DNA, 26 bp, Homo sapiens
tcacaagtcctgtctgtcccgccctc

SEQ ID NO: 8727 - DNA, 26 bp, Homo sapiens
cacaagtcctgtctgtcccgccctct

SEQ ID NO: 8728 - DNA, 26 bp, Homo sapiens
acaagtcctgtctgtcccgccctctt

SEQ ID NO: 8729 - DNA, 26 bp, Homo sapiens
caagtcctgtctgtcccgccctcttg

SEQ ID NO: 8730 - DNA, 26 bp, Homo sapiens
aagtcctgtctgtcccgccctcttgc

SEQ ID NO: 8731 - DNA, 26 bp, Homo sapiens
agtcctgtctgtcccgccctcttgcg

SEQ ID NO: 8732 - DNA, 26 bp, Homo sapiens
gtcctgtctgtcccgccctcttgcgt

SEQ ID NO: 8733 - DNA, 26 bp, Homo sapiens
tcctgtctgtcccgccctcttgcgta

SEQ ID NO: 8734 - DNA, 26 bp, Homo sapiens
cctgtctgtcccgccctcttgcgtag

SEQ ID NO: 8735 - DNA, 26 bp, Homo sapiens
ctgtctgtcccgccctcttgcgtagg

SEQ ID NO: 8736 - DNA, 26 bp, Homo sapiens
tgtctgtcccgccctcttgcgtaggc

SEQ ID NO: 8737 - DNA, 26 bp, Homo sapiens
gtctgtcccgccctcttgcgtaggcc

SEQ ID NO: 8738 - DNA, 26 bp, Homo sapiens
tctgtcccgccctcttgcgtaggcct

SEQ ID NO: 8739 - DNA, 26 bp, Homo sapiens
ctgtcccgccctcttgcgtaggcctt

SEQ ID NO: 8740 - DNA, 26 bp, Homo sapiens
tgtcccgccctcttgcgtaggccttc

SEQ ID NO: 8741 - DNA, 26 bp, Homo sapiens
gtcccgccctcttgcgtaggccttct

SEQ ID NO: 8742 - DNA, 26 bp, Homo sapiens
tcccgccctcttgcgtaggccttctg

SEQ ID NO: 8743 - DNA, 26 bp, Homo sapiens
cccgccctcttgcgtaggccttctgc

SEQ ID NO: 8744 - DNA, 26 bp, Homo sapiens
ccgccctcttgcgtaggccttctgct

SEQ ID NO: 8745 - DNA, 26 bp, Homo sapiens
cgccctcttgcgtaggccttctgctc

SEQ ID NO: 8746 - DNA, 26 bp, Homo sapiens
gccctcttgcgtaggccttctgctcc

SEQ ID NO: 8747 - DNA, 26 bp, Homo sapiens
ccctcttgcgtaggccttctgctccc

SEQ ID NO: 8748 - DNA, 26 bp, Homo sapiens
cctcttgcgtaggccttctgctcccc

SEQ ID NO: 8749 - DNA, 26 bp, Homo sapiens
ctcttgcgtaggccttctgctcccca

SEQ ID NO: 8750 - DNA, 26 bp, Homo sapiens
tcttgcgtaggccttctgctccccag

SEQ ID NO: 8751 - DNA, 26 bp, Homo sapiens
cttgcgtaggccttctgctccccagt

SEQ ID NO: 8752 - DNA, 26 bp, Homo sapiens
ttgcgtaggccttctgctccccagtt

SEQ ID NO: 8753 - DNA, 26 bp, Homo sapiens
tgcgtaggccttctgctccccagttc

SEQ ID NO: 8754 - DNA, 26 bp, Homo sapiens
gcgtaggccttctgctccccagttcc

SEQ ID NO: 8755 - DNA, 26 bp, Homo sapiens
cgtaggccttctgctccccagttcca

SEQ ID NO: 8756 - DNA, 26 bp, Homo sapiens
gtaggccttctgctccccagttccat

SEQ ID NO: 8757 - DNA, 26 bp, Homo sapiens
taggccttctgctccccagttccatt

SEQ ID NO: 8758 - DNA, 26 bp, Homo sapiens
aggccttctgctccccagttccattt

SEQ ID NO: 8759 - DNA, 26 bp, Homo sapiens
ggccttctgctccccagttccatttt

SEQ ID NO: 8760 - DNA, 26 bp, Homo sapiens
gccttctgctccccagttccattttc

SEQ ID NO: 8761 - DNA, 26 bp, Homo sapiens
ccttctgctccccagttccattttct

SEQ ID NO: 8762 - DNA, 26 bp, Homo sapiens
cttctgctccccagttccattttctt

SEQ ID NO: 8763 - DNA, 26 bp, Homo sapiens
ttctgctccccagttccattttcttt

SEQ ID NO: 8764 - DNA, 26 bp, Homo sapiens
tctgctccccagttccattttctttt

SEQ ID NO: 8765 - DNA, 26 bp, Homo sapiens
ctgctccccagttccattttcttttt

SEQ ID NO: 8766 - DNA, 26 bp, Homo sapiens
tgctccccagttccattttctttttc

SEQ ID NO: 8767 - DNA, 26 bp, Homo sapiens
gctccccagttccattttctttttcc

SEQ ID NO: 8768 - DNA, 26 bp, Homo sapiens
ctccccagttccattttctttttcct

SEQ ID NO: 8769 - DNA, 26 bp, Homo sapiens
tccccagttccattttctttttcctg

SEQ ID NO: 8770 - DNA, 26 bp, Homo sapiens
ccccagttccattttctttttcctgg

SEQ ID NO: 8771 - DNA, 26 bp, Homo sapiens
cccagttccattttctttttcctgga

SEQ ID NO: 8772 - DNA, 26 bp, Homo sapiens
ccagttccattttctttttcctggac

SEQ ID NO: 8773 - DNA, 26 bp, Homo sapiens
cagttccattttctttttcctggaca

SEQ ID NO: 8774 - DNA, 26 bp, Homo sapiens
agttccattttctttttcctggacag

SEQ ID NO: 8775 - DNA, 26 bp, Homo sapiens
gttccattttctttttcctggacagc

SEQ ID NO: 8776 - DNA, 26 bp, Homo sapiens
ttccattttctttttcctggacagct

SEQ ID NO: 8777 - DNA, 26 bp, Homo sapiens
tccattttctttttcctggacagctt

SEQ ID NO: 8778 - DNA, 26 bp, Homo sapiens
ccattttctttttcctggacagcttc

SEQ ID NO: 8779 - DNA, 26 bp, Homo sapiens
cattttctttttcctggacagcttcc

SEQ ID NO: 8780 - DNA, 26 bp, Homo sapiens
attttctttttcctggacagcttcca

SEQ ID NO: 8781 - DNA, 26 bp, Homo sapiens
ttttctttttcctggacagcttccaa

SEQ ID NO: 8782 - DNA, 26 bp, Homo sapiens
tttctttttcctggacagcttccaat

SEQ ID NO: 8783 - DNA, 26 bp, Homo sapiens
ttctttttcctggacagcttccaatg

SEQ ID NO: 8784 - DNA, 26 bp, Homo sapiens
tctttttcctggacagcttccaatgt

SEQ ID NO: 8785 - DNA, 26 bp, Homo sapiens
ctttttcctggacagcttccaatgtc

SEQ ID NO: 8786 - DNA, 26 bp, Homo sapiens
tttttcctggacagcttccaatgtca

SEQ ID NO: 8787 - DNA, 26 bp, Homo sapiens
ttttcctggacagcttccaatgtcac

SEQ ID NO: 8788 - DNA, 26 bp, Homo sapiens
tttcctggacagcttccaatgtcacc

SEQ ID NO: 8789 - DNA, 26 bp, Homo sapiens
ttcctggacagcttccaatgtcaccc

SEQ ID NO: 8790 - DNA, 26 bp, Homo sapiens
tcctggacagcttccaatgtcacccc

SEQ ID NO: 8791 - DNA, 26 bp, Homo sapiens
cctggacagcttccaatgtcacccct

SEQ ID NO: 8792 - DNA, 26 bp, Homo sapiens
ctggacagcttccaatgtcacccctc

SEQ ID NO: 8793 - DNA, 26 bp, Homo sapiens
tggacagcttccaatgtcacccctcc

SEQ ID NO: 8794 - DNA, 26 bp, Homo sapiens
ggacagcttccaatgtcacccctcca

SEQ ID NO: 8795 - DNA, 26 bp, Homo sapiens
gacagcttccaatgtcacccctccaa

SEQ ID NO: 8796 - DNA, 26 bp, Homo sapiens
acagcttccaatgtcacccctccaat

SEQ ID NO: 8797 - DNA, 26 bp, Homo sapiens
cagcttccaatgtcacccctccaatc

SEQ ID NO: 8798 - DNA, 26 bp, Homo sapiens
agcttccaatgtcacccctccaatct

SEQ ID NO: 8799 - DNA, 26 bp, Homo sapiens
gcttccaatgtcacccctccaatctg

SEQ ID NO: 8800 - DNA, 26 bp, Homo sapiens
cttccaatgtcacccctccaatctgc

SEQ ID NO: 8801 - DNA, 26 bp, Homo sapiens
ttccaatgtcacccctccaatctgca

SEQ ID NO: 8802 - DNA, 26 bp, Homo sapiens
tccaatgtcacccctccaatctgcac

SEQ ID NO: 8803 - DNA, 26 bp, Homo sapiens
ccaatgtcacccctccaatctgcacc

SEQ ID NO: 8804 - DNA, 26 bp, Homo sapiens
caatgtcacccctccaatctgcaccg

SEQ ID NO: 8805 - DNA, 26 bp, Homo sapiens
aatgtcacccctccaatctgcaccgc

SEQ ID NO: 8806 - DNA, 26 bp, Homo sapiens
atgtcacccctccaatctgcaccgct

SEQ ID NO: 8807 - DNA, 26 bp, Homo sapiens
tgtcacccctccaatctgcaccgcta

SEQ ID NO: 8808 - DNA, 26 bp, Homo sapiens
gtcacccctccaatctgcaccgctaa

SEQ ID NO: 8809 - DNA, 26 bp, Homo sapiens
tcacccctccaatctgcaccgctaac

SEQ ID NO: 8810 - DNA, 26 bp, Homo sapiens
cacccctccaatctgcaccgctaaca

SEQ ID NO: 8811 - DNA, 26 bp, Homo sapiens
acccctccaatctgcaccgctaacag

SEQ ID NO: 8812 - DNA, 26 bp, Homo sapiens
cccctccaatctgcaccgctaacaga

SEQ ID NO: 8813 - DNA, 26 bp, Homo sapiens
ccctccaatctgcaccgctaacagac

SEQ ID NO: 8814 - DNA, 26 bp, Homo sapiens
cctccaatctgcaccgctaacagact

SEQ ID NO: 8815 - DNA, 26 bp, Homo sapiens
ctccaatctgcaccgctaacagactg

SEQ ID NO: 8816 - DNA, 26 bp, Homo sapiens
tccaatctgcaccgctaacagactgg

SEQ ID NO: 8817 - DNA, 26 bp, Homo sapiens
ccaatctgcaccgctaacagactggc

SEQ ID NO: 8818 - DNA, 26 bp, Homo sapiens
caatctgcaccgctaacagactggcc

SEQ ID NO: 8819 - DNA, 26 bp, Homo sapiens
aatctgcaccgctaacagactggccc

SEQ ID NO: 8820 - DNA, 26 bp, Homo sapiens
atctgcaccgctaacagactggcccc

SEQ ID NO: 8821 - DNA, 26 bp, Homo sapiens
tctgcaccgctaacagactggccccc

SEQ ID NO: 8822 - DNA, 26 bp, Homo sapiens
ctgcaccgctaacagactggcccccc

SEQ ID NO: 8823 - DNA, 26 bp, Homo sapiens
tgcaccgctaacagactggcccccct

SEQ ID NO: 8824 - DNA, 26 bp, Homo sapiens
gcaccgctaacagactggcccccctt

SEQ ID NO: 8825 - DNA, 26 bp, Homo sapiens
caccgctaacagactggccccccttt

SEQ ID NO: 8826 - DNA, 26 bp, Homo sapiens
accgctaacagactggcccccctttg

SEQ ID NO: 8827 - DNA, 26 bp, Homo sapiens
ccgctaacagactggcccccctttgc

SEQ ID NO: 8828 - DNA, 26 bp, Homo sapiens
cgctaacagactggcccccctttgct

SEQ ID NO: 8829 - DNA, 26 bp, Homo sapiens
gctaacagactggcccccctttgctg

SEQ ID NO: 8830 - DNA, 26 bp, Homo sapiens
ctaacagactggcccccctttgctgg

SEQ ID NO: 8831 - DNA, 26 bp, Homo sapiens
taacagactggcccccctttgctggc

SEQ ID NO: 8832 - DNA, 26 bp, Homo sapiens
aacagactggcccccctttgctggcg

SEQ ID NO: 8833 - DNA, 26 bp, Homo sapiens
acagactggcccccctttgctggcga

SEQ ID NO: 8834 - DNA, 26 bp, Homo sapiens
cagactggcccccctttgctggcgag

SEQ ID NO: 8835 - DNA, 26 bp, Homo sapiens
agactggcccccctttgctggcgagg

SEQ ID NO: 8836 - DNA, 26 bp, Homo sapiens
gactggcccccctttgctggcgaggt

SEQ ID NO: 8837 - DNA, 26 bp, Homo sapiens
actggcccccctttgctggcgaggta

SEQ ID NO: 8838 - DNA, 26 bp, Homo sapiens
ctggcccccctttgctggcgaggtaa

SEQ ID NO: 8839 - DNA, 26 bp, Homo sapiens
tggcccccctttgctggcgaggtaaa

SEQ ID NO: 8840 - DNA, 26 bp, Homo sapiens
ggcccccctttgctggcgaggtaaag

SEQ ID NO: 8841 - DNA, 26 bp, Homo sapiens
gcccccctttgctggcgaggtaaagt

SEQ ID NO: 8842 - DNA, 26 bp, Homo sapiens
cccccctttgctggcgaggtaaagtc

SEQ ID NO: 8843 - DNA, 26 bp, Homo sapiens
ccccctttgctggcgaggtaaagtct

SEQ ID NO: 8844 - DNA, 26 bp, Homo sapiens
cccctttgctggcgaggtaaagtctc

SEQ ID NO: 8845 - DNA, 26 bp, Homo sapiens
ccctttgctggcgaggtaaagtctca

SEQ ID NO: 8846 - DNA, 26 bp, Homo sapiens
cctttgctggcgaggtaaagtctcaa

SEQ ID NO: 8847 - DNA, 26 bp, Homo sapiens
ctttgctggcgaggtaaagtctcaaa

SEQ ID NO: 8848 - DNA, 26 bp, Homo sapiens
tttgctggcgaggtaaagtctcaaaa

SEQ ID NO: 8849 - DNA, 26 bp, Homo sapiens
ttgctggcgaggtaaagtctcaaaac

SEQ ID NO: 8850 - DNA, 26 bp, Homo sapiens
tgctggcgaggtaaagtctcaaaacc

SEQ ID NO: 8851 - DNA, 26 bp, Homo sapiens
gctggcgaggtaaagtctcaaaaccg

SEQ ID NO: 8852 - DNA, 26 bp, Homo sapiens
ctggcgaggtaaagtctcaaaaccgt

SEQ ID NO: 8853 - DNA, 26 bp, Homo sapiens
tggcgaggtaaagtctcaaaaccgta

SEQ ID NO: 8854 - DNA, 26 bp, Homo sapiens
ggcgaggtaaagtctcaaaaccgtaa

SEQ ID NO: 8855 - DNA, 26 bp, Homo sapiens
gcgaggtaaagtctcaaaaccgtaaa

SEQ ID NO: 8856 - DNA, 26 bp, Homo sapiens
cgaggtaaagtctcaaaaccgtaaat

SEQ ID NO: 8857 - DNA, 26 bp, Homo sapiens
gaggtaaagtctcaaaaccgtaaatc

SEQ ID NO: 8858 - DNA, 26 bp, Homo sapiens
aggtaaagtctcaaaaccgtaaatca

SEQ ID NO: 8859 - DNA, 26 bp, Homo sapiens
ggtaaagtctcaaaaccgtaaatcac

SEQ ID NO: 8860 - DNA, 26 bp, Homo sapiens
gtaaagtctcaaaaccgtaaatcacg

SEQ ID NO: 8861 - DNA, 26 bp, Homo sapiens
taaagtctcaaaaccgtaaatcacgg

SEQ ID NO: 8862 - DNA, 26 bp, Homo sapiens
aaagtctcaaaaccgtaaatcacggc

SEQ ID NO: 8863 - DNA, 26 bp, Homo sapiens
aagtctcaaaaccgtaaatcacggcc

SEQ ID NO: 8864 - DNA, 26 bp, Homo sapiens
agtctcaaaaccgtaaatcacggcct

SEQ ID NO: 8865 - DNA, 26 bp, Homo sapiens
gtctcaaaaccgtaaatcacggcctt

SEQ ID NO: 8866 - DNA, 26 bp, Homo sapiens
tctcaaaaccgtaaatcacggccttc

SEQ ID NO: 8867 - DNA, 26 bp, Homo sapiens
ctcaaaaccgtaaatcacggccttcg

SEQ ID NO: 8868 - DNA, 26 bp, Homo sapiens
tcaaaaccgtaaatcacggccttcga

SEQ ID NO: 8869 - DNA, 26 bp, Homo sapiens
caaaaccgtaaatcacggccttcgat

SEQ ID NO: 8870 - DNA, 26 bp, Homo sapiens
aaaaccgtaaatcacggccttcgata

SEQ ID NO: 8871 - DNA, 26 bp, Homo sapiens
aaaccgtaaatcacggccttcgatac

SEQ ID NO: 8872 - DNA, 26 bp, Homo sapiens
aaccgtaaatcacggccttcgatacg

SEQ ID NO: 8873 - DNA, 26 bp, Homo sapiens
accgtaaatcacggccttcgatacgc

SEQ ID NO: 8874 - DNA, 26 bp, Homo sapiens
ccgtaaatcacggccttcgatacgcc

SEQ ID NO: 8875 - DNA, 26 bp, Homo sapiens
cgtaaatcacggccttcgatacgcca

SEQ ID NO: 8876 - DNA, 26 bp, Homo sapiens
gtaaatcacggccttcgatacgccag

SEQ ID NO: 8877 - DNA, 26 bp, Homo sapiens
taaatcacggccttcgatacgccagc

SEQ ID NO: 8878 - DNA, 26 bp, Homo sapiens
aaatcacggccttcgatacgccagca

SEQ ID NO: 8879 - DNA, 26 bp, Homo sapiens
aatcacggccttcgatacgccagcat

SEQ ID NO: 8880 - DNA, 26 bp, Homo sapiens
atcacggccttcgatacgccagcatg

SEQ ID NO: 8881 - DNA, 26 bp, Homo sapiens
tcacggccttcgatacgccagcatgt

SEQ ID NO: 8882 - DNA, 26 bp, Homo sapiens
cacggccttcgatacgccagcatgtg

SEQ ID NO: 8883 - DNA, 26 bp, Homo sapiens
acggccttcgatacgccagcatgtgg

SEQ ID NO: 8884 - DNA, 26 bp, Homo sapiens
cggccttcgatacgccagcatgtggt

SEQ ID NO: 8885 - DNA, 26 bp, Homo sapiens
ggccttcgatacgccagcatgtggtt

SEQ ID NO: 8886 - DNA, 26 bp, Homo sapiens
gccttcgatacgccagcatgtggtta

SEQ ID NO: 8887 - DNA, 26 bp, Homo sapiens
ccttcgatacgccagcatgtggttac

SEQ ID NO: 8888 - DNA, 26 bp, Homo sapiens
cttcgatacgccagcatgtggttact

SEQ ID NO: 8889 - DNA, 26 bp, Homo sapiens
ttcgatacgccagcatgtggttactt

SEQ ID NO: 8890 - DNA, 26 bp, Homo sapiens
tcgatacgccagcatgtggttacttt

SEQ ID NO: 8891 - DNA, 26 bp, Homo sapiens
cgatacgccagcatgtggttactttg

SEQ ID NO: 8892 - DNA, 26 bp, Homo sapiens
gatacgccagcatgtggttactttgt

SEQ ID NO: 8893 - DNA, 26 bp, Homo sapiens
atacgccagcatgtggttactttgtg

SEQ ID NO: 8894 - DNA, 26 bp, Homo sapiens
tacgccagcatgtggttactttgtgg

SEQ ID NO: 8895 - DNA, 26 bp, Homo sapiens
acgccagcatgtggttactttgtgga

SEQ ID NO: 8896 - DNA, 26 bp, Homo sapiens
cgccagcatgtggttactttgtggat

SEQ ID NO: 8897 - DNA, 26 bp, Homo sapiens
gccagcatgtggttactttgtggatg

SEQ ID NO: 8898 - DNA, 26 bp, Homo sapiens
ccagcatgtggttactttgtggatgt

SEQ ID NO: 8899 - DNA, 26 bp, Homo sapiens
cagcatgtggttactttgtggatgtt

SEQ ID NO: 8900 - DNA, 26 bp, Homo sapiens
agcatgtggttactttgtggatgttg

SEQ ID NO: 8901 - DNA, 26 bp, Homo sapiens
gcatgtggttactttgtggatgttgt

SEQ ID NO: 8902 - DNA, 26 bp, Homo sapiens
catgtggttactttgtggatgttgtt

SEQ ID NO: 8903 - DNA, 26 bp, Homo sapiens
atgtggttactttgtggatgttgttt

SEQ ID NO: 8904 - DNA, 26 bp, Homo sapiens
tgtggttactttgtggatgttgtttc

SEQ ID NO: 8905 - DNA, 26 bp, Homo sapiens
gtggttactttgtggatgttgtttcc

SEQ ID NO: 8906 - DNA, 26 bp, Homo sapiens
tggttactttgtggatgttgtttcct

SEQ ID NO: 8907 - DNA, 26 bp, Homo sapiens
ggttactttgtggatgttgtttcctt

SEQ ID NO: 8908 - DNA, 26 bp, Homo sapiens
gttactttgtggatgttgtttccttc

SEQ ID NO: 8909 - DNA, 26 bp, Homo sapiens
ttactttgtggatgttgtttccttcc

SEQ ID NO: 8910 - DNA, 26 bp, Homo sapiens
tactttgtggatgttgtttccttcca

SEQ ID NO: 8911 - DNA, 26 bp, Homo sapiens
actttgtggatgttgtttccttccac

SEQ ID NO: 8912 - DNA, 26 bp, Homo sapiens
ctttgtggatgttgtttccttccact

SEQ ID NO: 8913 - DNA, 26 bp, Homo sapiens
tttgtggatgttgtttccttccactc

SEQ ID NO: 8914 - DNA, 26 bp, Homo sapiens
ttgtggatgttgtttccttccactct

SEQ ID NO: 8915 - DNA, 26 bp, Homo sapiens
tgtggatgttgtttccttccactctt

SEQ ID NO: 8916 - DNA, 26 bp, Homo sapiens
gtggatgttgtttccttccactcttc

SEQ ID NO: 8917 - DNA, 26 bp, Homo sapiens
tggatgttgtttccttccactcttct

SEQ ID NO: 8918 - DNA, 26 bp, Homo sapiens
ggatgttgtttccttccactcttctc

SEQ ID NO: 8919 - DNA, 26 bp, Homo sapiens
gatgttgtttccttccactcttctcg

SEQ ID NO: 8920 - DNA, 26 bp, Homo sapiens
atgttgtttccttccactcttctcgt

SEQ ID NO: 8921 - DNA, 26 bp, Homo sapiens
tgttgtttccttccactcttctcgtt

SEQ ID NO: 8922 - DNA, 26 bp, Homo sapiens
gttgtttccttccactcttctcgttc

SEQ ID NO: 8923 - DNA, 26 bp, Homo sapiens
ttgtttccttccactcttctcgttcc

SEQ ID NO: 8924 - DNA, 26 bp, Homo sapiens
tgtttccttccactcttctcgttcct

SEQ ID NO: 8925 - DNA, 26 bp, Homo sapiens
gtttccttccactcttctcgttcctt

SEQ ID NO: 8926 - DNA, 26 bp, Homo sapiens
tttccttccactcttctcgttccttt

SEQ ID NO: 8927 - DNA, 26 bp, Homo sapiens
ttccttccactcttctcgttcctttg

SEQ ID NO: 8928 - DNA, 26 bp, Homo sapiens
tccttccactcttctcgttcctttgg

SEQ ID NO: 8929 - DNA, 26 bp, Homo sapiens
ccttccactcttctcgttcctttggg

SEQ ID NO: 8930 - DNA, 26 bp, Homo sapiens
cttccactcttctcgttcctttgggt

SEQ ID NO: 8931 - DNA, 26 bp, Homo sapiens
ttccactcttctcgttcctttgggtg

SEQ ID NO: 8932 - DNA, 26 bp, Homo sapiens
tccactcttctcgttcctttgggtgt

SEQ ID NO: 8933 - DNA, 26 bp, Homo sapiens
ccactcttctcgttcctttgggtgta

SEQ ID NO: 8934 - DNA, 26 bp, Homo sapiens
cactcttctcgttcctttgggtgtac

SEQ ID NO: 8935 - DNA, 26 bp, Homo sapiens
actcttctcgttcctttgggtgtacc

SEQ ID NO: 8936 - DNA, 26 bp, Homo sapiens
ctcttctcgttcctttgggtgtacct

SEQ ID NO: 8937 - DNA, 26 bp, Homo sapiens
tcttctcgttcctttgggtgtacctg

SEQ ID NO: 8938 - DNA, 26 bp, Homo sapiens
cttctcgttcctttgggtgtacctgc

SEQ ID NO: 8939 - DNA, 26 bp, Homo sapiens
ttctcgttcctttgggtgtacctgca

SEQ ID NO: 8940 - DNA, 26 bp, Homo sapiens
tctcgttcctttgggtgtacctgcac

SEQ ID NO: 8941 - DNA, 26 bp, Homo sapiens
ctcgttcctttgggtgtacctgcacc

SEQ ID NO: 8942 - DNA, 26 bp, Homo sapiens
tcgttcctttgggtgtacctgcaccc

SEQ ID NO: 8943 - DNA, 26 bp, Homo sapiens
cgttcctttgggtgtacctgcaccca

SEQ ID NO: 8944 - DNA, 26 bp, Homo sapiens
gttcctttgggtgtacctgcacccag

SEQ ID NO: 8945 - DNA, 26 bp, Homo sapiens
ttcctttgggtgtacctgcacccagt

SEQ ID NO: 8946 - DNA, 26 bp, Homo sapiens
tcctttgggtgtacctgcacccagtc

SEQ ID NO: 8947 - DNA, 26 bp, Homo sapiens
cctttgggtgtacctgcacccagtct

SEQ ID NO: 8948 - DNA, 26 bp, Homo sapiens
ctttgggtgtacctgcacccagtctg

SEQ ID NO: 8949 - DNA, 26 bp, Homo sapiens
tttgggtgtacctgcacccagtctgt

SEQ ID NO: 8950 - DNA, 26 bp, Homo sapiens
ttgggtgtacctgcacccagtctgtg

SEQ ID NO: 8951 - DNA, 26 bp, Homo sapiens
tgggtgtacctgcacccagtctgtgc

SEQ ID NO: 8952 - DNA, 26 bp, Homo sapiens
gggtgtacctgcacccagtctgtgcc

SEQ ID NO: 8953 - DNA, 26 bp, Homo sapiens
ggtgtacctgcacccagtctgtgcct

SEQ ID NO: 8954 - DNA, 26 bp, Homo sapiens
gtgtacctgcacccagtctgtgcctc

SEQ ID NO: 8955 - DNA, 26 bp, Homo sapiens
tgtacctgcacccagtctgtgcctct

SEQ ID NO: 8956 - DNA, 26 bp, Homo sapiens
gtacctgcacccagtctgtgcctcta

SEQ ID NO: 8957 - DNA, 26 bp, Homo sapiens
tacctgcacccagtctgtgcctctaa

SEQ ID NO: 8958 - DNA, 26 bp, Homo sapiens
acctgcacccagtctgtgcctctaac

SEQ ID NO: 8959 - DNA, 26 bp, Homo sapiens
cctgcacccagtctgtgcctctaaca

SEQ ID NO: 8960 - DNA, 26 bp, Homo sapiens
ctgcacccagtctgtgcctctaacat

SEQ ID NO: 8961 - DNA, 26 bp, Homo sapiens
tgcacccagtctgtgcctctaacatg

SEQ ID NO: 8962 - DNA, 26 bp, Homo sapiens
gcacccagtctgtgcctctaacatgt

SEQ ID NO: 8963 - DNA, 26 bp, Homo sapiens
cacccagtctgtgcctctaacatgta

SEQ ID NO: 8964 - DNA, 26 bp, Homo sapiens
acccagtctgtgcctctaacatgtag

SEQ ID NO: 8965 - DNA, 26 bp, Homo sapiens
cccagtctgtgcctctaacatgtagt

SEQ ID NO: 8966 - DNA, 26 bp, Homo sapiens
ccagtctgtgcctctaacatgtagtc

SEQ ID NO: 8967 - DNA, 26 bp, Homo sapiens
cagtctgtgcctctaacatgtagtcc

SEQ ID NO: 8968 - DNA, 26 bp, Homo sapiens
agtctgtgcctctaacatgtagtccc

SEQ ID NO: 8969 - DNA, 26 bp, Homo sapiens
gtctgtgcctctaacatgtagtcccc

SEQ ID NO: 8970 - DNA, 26 bp, Homo sapiens
tctgtgcctctaacatgtagtccccc

SEQ ID NO: 8971 - DNA, 26 bp, Homo sapiens
ctgtgcctctaacatgtagtccccct

SEQ ID NO: 8972 - DNA, 26 bp, Homo sapiens
tgtgcctctaacatgtagtccccctt

SEQ ID NO: 8973 - DNA, 26 bp, Homo sapiens
gtgcctctaacatgtagtcccccttc

SEQ ID NO: 8974 - DNA, 26 bp, Homo sapiens
tgcctctaacatgtagtcccccttca

SEQ ID NO: 8975 - DNA, 26 bp, Homo sapiens
gcctctaacatgtagtcccccttcaa

SEQ ID NO: 8976 - DNA, 26 bp, Homo sapiens
cctctaacatgtagtcccccttcaat

SEQ ID NO: 8977 - DNA, 26 bp, Homo sapiens
ctctaacatgtagtcccccttcaatc

SEQ ID NO: 8978 - DNA, 26 bp, Homo sapiens
tctaacatgtagtcccccttcaatca

SEQ ID NO: 8979 - DNA, 26 bp, Homo sapiens
ctaacatgtagtcccccttcaatcaa

SEQ ID NO: 8980 - DNA, 26 bp, Homo sapiens
taacatgtagtcccccttcaatcaaa

SEQ ID NO: 8981 - DNA, 26 bp, Homo sapiens
aacatgtagtcccccttcaatcaaac

SEQ ID NO: 8982 - DNA, 26 bp, Homo sapiens
acatgtagtcccccttcaatcaaacc

SEQ ID NO: 8983 - DNA, 26 bp, Homo sapiens
catgtagtcccccttcaatcaaacca

SEQ ID NO: 8984 - DNA, 26 bp, Homo sapiens
atgtagtcccccttcaatcaaaccac

SEQ ID NO: 8985 - DNA, 26 bp, Homo sapiens
tgtagtcccccttcaatcaaaccact

SEQ ID NO: 8986 - DNA, 26 bp, Homo sapiens
gtagtcccccttcaatcaaaccactg

SEQ ID NO: 8987 - DNA, 26 bp, Homo sapiens
tagtcccccttcaatcaaaccactgc

SEQ ID NO: 8988 - DNA, 26 bp, Homo sapiens
agtcccccttcaatcaaaccactgca

SEQ ID NO: 8989 - DNA, 26 bp, Homo sapiens
gtcccccttcaatcaaaccactgcaa

SEQ ID NO: 8990 - DNA, 26 bp, Homo sapiens
tcccccttcaatcaaaccactgcaaa

SEQ ID NO: 8991 - DNA, 26 bp, Homo sapiens
cccccttcaatcaaaccactgcaaac

SEQ ID NO: 8992 - DNA, 26 bp, Homo sapiens
ccccttcaatcaaaccactgcaaacc

SEQ ID NO: 8993 - DNA, 26 bp, Homo sapiens
cccttcaatcaaaccactgcaaaccc

SEQ ID NO: 8994 - DNA, 26 bp, Homo sapiens
ccttcaatcaaaccactgcaaacccc

SEQ ID NO: 8995 - DNA, 26 bp, Homo sapiens
cttcaatcaaaccactgcaaacccca

SEQ ID NO: 8996 - DNA, 26 bp, Homo sapiens
ttcaatcaaaccactgcaaaccccag

SEQ ID NO: 8997 - DNA, 26 bp, Homo sapiens
tcaatcaaaccactgcaaaccccagc

SEQ ID NO: 8998 - DNA, 26 bp, Homo sapiens
caatcaaaccactgcaaaccccagct

SEQ ID NO: 8999 - DNA, 26 bp, Homo sapiens
aatcaaaccactgcaaaccccagctt

SEQ ID NO: 9000 - DNA, 26 bp, Homo sapiens
atcaaaccactgcaaaccccagcttc

SEQ ID NO: 9001 - DNA, 26 bp, Homo sapiens
tcaaaccactgcaaaccccagcttcc

SEQ ID NO: 9002 - DNA, 26 bp, Homo sapiens
caaaccactgcaaaccccagcttccc

SEQ ID NO: 9003 - DNA, 26 bp, Homo sapiens
aaaccactgcaaaccccagcttcccc

SEQ ID NO: 9004 - DNA, 26 bp, Homo sapiens
aaccactgcaaaccccagcttcccct

SEQ ID NO: 9005 - DNA, 26 bp, Homo sapiens
accactgcaaaccccagcttcccctc

SEQ ID NO: 9006 - DNA, 26 bp, Homo sapiens
ccactgcaaaccccagcttcccctca

SEQ ID NO: 9007 - DNA, 26 bp, Homo sapiens
cactgcaaaccccagcttcccctcat

SEQ ID NO: 9008 - DNA, 26 bp, Homo sapiens
actgcaaaccccagcttcccctcatt

SEQ ID NO: 9009 - DNA, 26 bp, Homo sapiens
ctgcaaaccccagcttcccctcattt

SEQ ID NO: 9010 - DNA, 26 bp, Homo sapiens
tgcaaaccccagcttcccctcatttc

SEQ ID NO: 9011 - DNA, 26 bp, Homo sapiens
gcaaaccccagcttcccctcatttcc

SEQ ID NO: 9012 - DNA, 26 bp, Homo sapiens
caaaccccagcttcccctcatttccc

SEQ ID NO: 9013 - DNA, 26 bp, Homo sapiens
aaaccccagcttcccctcatttccca

SEQ ID NO: 9014 - DNA, 26 bp, Homo sapiens
aaccccagcttcccctcatttcccag

SEQ ID NO: 9015 - DNA, 26 bp, Homo sapiens
accccagcttcccctcatttcccagg

SEQ ID NO: 9016 - DNA, 26 bp, Homo sapiens
ccccagcttcccctcatttcccagga

SEQ ID NO: 9017 - DNA, 26 bp, Homo sapiens
cccagcttcccctcatttcccaggac

SEQ ID NO: 9018 - DNA, 26 bp, Homo sapiens
ccagcttcccctcatttcccaggaca

SEQ ID NO: 9019 - DNA, 26 bp, Homo sapiens
cagcttcccctcatttcccaggacaa

SEQ ID NO: 9020 - DNA, 26 bp, Homo sapiens
agcttcccctcatttcccaggacaag

SEQ ID NO: 9021 - DNA, 26 bp, Homo sapiens
gcttcccctcatttcccaggacaagt

SEQ ID NO: 9022 - DNA, 26 bp, Homo sapiens
cttcccctcatttcccaggacaagtg

SEQ ID NO: 9023 - DNA, 26 bp, Homo sapiens
ttcccctcatttcccaggacaagtgg

SEQ ID NO: 9024 - DNA, 26 bp, Homo sapiens
tcccctcatttcccaggacaagtggg

SEQ ID NO: 9025 - DNA, 26 bp, Homo sapiens
cccctcatttcccaggacaagtgggc

SEQ ID NO: 9026 - DNA, 26 bp, Homo sapiens
ccctcatttcccaggacaagtgggcc

SEQ ID NO: 9027 - DNA, 26 bp, Homo sapiens
cctcatttcccaggacaagtgggcct

SEQ ID NO: 9028 - DNA, 26 bp, Homo sapiens
ctcatttcccaggacaagtgggccta

SEQ ID NO: 9029 - DNA, 26 bp, Homo sapiens
tcatttcccaggacaagtgggcctat

SEQ ID NO: 9030 - DNA, 26 bp, Homo sapiens
catttcccaggacaagtgggcctatc

SEQ ID NO: 9031 - DNA, 26 bp, Homo sapiens
atttcccaggacaagtgggcctatct

SEQ ID NO: 9032 - DNA, 26 bp, Homo sapiens
tttcccaggacaagtgggcctatctc

SEQ ID NO: 9033 - DNA, 26 bp, Homo sapiens
ttcccaggacaagtgggcctatctcc

SEQ ID NO: 9034 - DNA, 26 bp, Homo sapiens
tcccaggacaagtgggcctatctcca

SEQ ID NO: 9035 - DNA, 26 bp, Homo sapiens
cccaggacaagtgggcctatctccac

SEQ ID NO: 9036 - DNA, 26 bp, Homo sapiens
ccaggacaagtgggcctatctccacg

SEQ ID NO: 9037 - DNA, 26 bp, Homo sapiens
caggacaagtgggcctatctccacgg

SEQ ID NO: 9038 - DNA, 26 bp, Homo sapiens
aggacaagtgggcctatctccacggc

SEQ ID NO: 9039 - DNA, 26 bp, Homo sapiens
ggacaagtgggcctatctccacggcg

SEQ ID NO: 9040 - DNA, 26 bp, Homo sapiens
gacaagtgggcctatctccacggcgc

SEQ ID NO: 9041 - DNA, 26 bp, Homo sapiens
acaagtgggcctatctccacggcgcg

SEQ ID NO: 9042 - DNA, 26 bp, Homo sapiens
caagtgggcctatctccacggcgcgc

SEQ ID NO: 9043 - DNA, 26 bp, Homo sapiens
aagtgggcctatctccacggcgcgct

SEQ ID NO: 9044 - DNA, 26 bp, Homo sapiens
agtgggcctatctccacggcgcgctt

SEQ ID NO: 9045 - DNA, 26 bp, Homo sapiens
gtgggcctatctccacggcgcgctta

SEQ ID NO: 9046 - DNA, 26 bp, Homo sapiens
tgggcctatctccacggcgcgcttaa

SEQ ID NO: 9047 - DNA, 26 bp, Homo sapiens
gggcctatctccacggcgcgcttaat

SEQ ID NO: 9048 - DNA, 26 bp, Homo sapiens
ggcctatctccacggcgcgcttaatt

SEQ ID NO: 9049 - DNA, 26 bp, Homo sapiens
gcctatctccacggcgcgcttaattg

SEQ ID NO: 9050 - DNA, 26 bp, Homo sapiens
cctatctccacggcgcgcttaattgt

SEQ ID NO: 9051 - DNA, 26 bp, Homo sapiens
ctatctccacggcgcgcttaattgtt

SEQ ID NO: 9052 - DNA, 26 bp, Homo sapiens
tatctccacggcgcgcttaattgttt

SEQ ID NO: 9053 - DNA, 26 bp, Homo sapiens
atctccacggcgcgcttaattgtttt

SEQ ID NO: 9054 - DNA, 26 bp, Homo sapiens
tctccacggcgcgcttaattgtttta

SEQ ID NO: 9055 - DNA, 26 bp, Homo sapiens
ctccacggcgcgcttaattgttttac

SEQ ID NO: 9056 - DNA, 26 bp, Homo sapiens
tccacggcgcgcttaattgttttact

SEQ ID NO: 9057 - DNA, 26 bp, Homo sapiens
ccacggcgcgcttaattgttttactg

SEQ ID NO: 9058 - DNA, 26 bp, Homo sapiens
cacggcgcgcttaattgttttactgt

SEQ ID NO: 9059 - DNA, 26 bp, Homo sapiens
acggcgcgcttaattgttttactgtt

SEQ ID NO: 9060 - DNA, 26 bp, Homo sapiens
cggcgcgcttaattgttttactgttt

SEQ ID NO: 9061 - DNA, 26 bp, Homo sapiens
ggcgcgcttaattgttttactgtttc

SEQ ID NO: 9062 - DNA, 26 bp, Homo sapiens
gcgcgcttaattgttttactgtttcc

SEQ ID NO: 9063 - DNA, 26 bp, Homo sapiens
cgcgcttaattgttttactgtttcct

SEQ ID NO: 9064 - DNA, 26 bp, Homo sapiens
gcgcttaattgttttactgtttccta

SEQ ID NO: 9065 - DNA, 26 bp, Homo sapiens
cgcttaattgttttactgtttcctaa

SEQ ID NO: 9066 - DNA, 26 bp, Homo sapiens
gcttaattgttttactgtttcctaac

SEQ ID NO: 9067 - DNA, 26 bp, Homo sapiens
cttaattgttttactgtttcctaact

SEQ ID NO: 9068 - DNA, 26 bp, Homo sapiens
ttaattgttttactgtttcctaacta

SEQ ID NO: 9069 - DNA, 26 bp, Homo sapiens
taattgttttactgtttcctaactag

SEQ ID NO: 9070 - DNA, 26 bp, Homo sapiens
aattgttttactgtttcctaactagg

SEQ ID NO: 9071 - DNA, 26 bp, Homo sapiens
attgttttactgtttcctaactaggt

SEQ ID NO: 9072 - DNA, 26 bp, Homo sapiens
ttgttttactgtttcctaactaggtt

SEQ ID NO: 9073 - DNA, 26 bp, Homo sapiens
tgttttactgtttcctaactaggttg

SEQ ID NO: 9074 - DNA, 26 bp, Homo sapiens
gttttactgtttcctaactaggttgt

SEQ ID NO: 9075 - DNA, 26 bp, Homo sapiens
ttttactgtttcctaactaggttgtg

SEQ ID NO: 9076 - DNA, 26 bp, Homo sapiens
tttactgtttcctaactaggttgtga

SEQ ID NO: 9077 - DNA, 26 bp, Homo sapiens
ttactgtttcctaactaggttgtgag

SEQ ID NO: 9078 - DNA, 26 bp, Homo sapiens
tactgtttcctaactaggttgtgagc

SEQ ID NO: 9079 - DNA, 26 bp, Homo sapiens
actgtttcctaactaggttgtgagcg

SEQ ID NO: 9080 - DNA, 26 bp, Homo sapiens
ctgtttcctaactaggttgtgagcgc

SEQ ID NO: 9081 - DNA, 26 bp, Homo sapiens
tgtttcctaactaggttgtgagcgcc

SEQ ID NO: 9082 - DNA, 26 bp, Homo sapiens
gtttcctaactaggttgtgagcgcct

SEQ ID NO: 9083 - DNA, 26 bp, Homo sapiens
tttcctaactaggttgtgagcgcctg

SEQ ID NO: 9084 - DNA, 26 bp, Homo sapiens
ttcctaactaggttgtgagcgcctgc

SEQ ID NO: 9085 - DNA, 26 bp, Homo sapiens
tcctaactaggttgtgagcgcctgca

SEQ ID NO: 9086 - DNA, 26 bp, Homo sapiens
cctaactaggttgtgagcgcctgcag

SEQ ID NO: 9087 - DNA, 26 bp, Homo sapiens
ctaactaggttgtgagcgcctgcaga

SEQ ID NO: 9088 - DNA, 26 bp, Homo sapiens
taactaggttgtgagcgcctgcagat

SEQ ID NO: 9089 - DNA, 26 bp, Homo sapiens
aactaggttgtgagcgcctgcagatg

SEQ ID NO: 9090 - DNA, 26 bp, Homo sapiens
actaggttgtgagcgcctgcagatga

SEQ ID NO: 9091 - DNA, 26 bp, Homo sapiens
ctaggttgtgagcgcctgcagatgag

SEQ ID NO: 9092 - DNA, 26 bp, Homo sapiens
taggttgtgagcgcctgcagatgagg

SEQ ID NO: 9093 - DNA, 26 bp, Homo sapiens
aggttgtgagcgcctgcagatgaggg

SEQ ID NO: 9094 - DNA, 26 bp, Homo sapiens
ggttgtgagcgcctgcagatgagggg

SEQ ID NO: 9095 - DNA, 26 bp, Homo sapiens
gttgtgagcgcctgcagatgaggggc

SEQ ID NO: 9096 - DNA, 26 bp, Homo sapiens
ttgtgagcgcctgcagatgaggggcc

SEQ ID NO: 9097 - DNA, 26 bp, Homo sapiens
tgtgagcgcctgcagatgaggggccg

SEQ ID NO: 9098 - DNA, 26 bp, Homo sapiens
gtgagcgcctgcagatgaggggccgg

SEQ ID NO: 9099 - DNA, 26 bp, Homo sapiens
tgagcgcctgcagatgaggggccggt

SEQ ID NO: 9100 - DNA, 26 bp, Homo sapiens
gagcgcctgcagatgaggggccggtt

SEQ ID NO: 9101 - DNA, 26 bp, Homo sapiens
agcgcctgcagatgaggggccggttc

SEQ ID NO: 9102 - DNA, 26 bp, Homo sapiens
gcgcctgcagatgaggggccggttcc

SEQ ID NO: 9103 - DNA, 26 bp, Homo sapiens
cgcctgcagatgaggggccggttcct

SEQ ID NO: 9104 - DNA, 26 bp, Homo sapiens
gcctgcagatgaggggccggttccta

SEQ ID NO: 9105 - DNA, 26 bp, Homo sapiens
cctgcagatgaggggccggttcctat

SEQ ID NO: 9106 - DNA, 26 bp, Homo sapiens
ctgcagatgaggggccggttcctatt

SEQ ID NO: 9107 - DNA, 26 bp, Homo sapiens
tgcagatgaggggccggttcctattt

SEQ ID NO: 9108 - DNA, 26 bp, Homo sapiens
gcagatgaggggccggttcctattta

SEQ ID NO: 9109 - DNA, 26 bp, Homo sapiens
cagatgaggggccggttcctatttat

SEQ ID NO: 9110 - DNA, 26 bp, Homo sapiens
agatgaggggccggttcctatttata

SEQ ID NO: 9111 - DNA, 26 bp, Homo sapiens
gatgaggggccggttcctatttatat

SEQ ID NO: 9112 - DNA, 26 bp, Homo sapiens
atgaggggccggttcctatttatatt

SEQ ID NO: 9113 - DNA, 26 bp, Homo sapiens
tgaggggccggttcctatttatattc

SEQ ID NO: 9114 - DNA, 26 bp, Homo sapiens
gaggggccggttcctatttatattcg

SEQ ID NO: 9115 - DNA, 26 bp, Homo sapiens
aggggccggttcctatttatattcgc

SEQ ID NO: 9116 - DNA, 26 bp, Homo sapiens
ggggccggttcctatttatattcgca

SEQ ID NO: 9117 - DNA, 26 bp, Homo sapiens
gggccggttcctatttatattcgcat

SEQ ID NO: 9118 - DNA, 26 bp, Homo sapiens
ggccggttcctatttatattcgcatc

SEQ ID NO: 9119 - DNA, 26 bp, Homo sapiens
gccggttcctatttatattcgcatct

SEQ ID NO: 9120 - DNA, 26 bp, Homo sapiens
ccggttcctatttatattcgcatctc

SEQ ID NO: 9121 - DNA, 26 bp, Homo sapiens
cggttcctatttatattcgcatctcc

SEQ ID NO: 9122 - DNA, 26 bp, Homo sapiens
ggttcctatttatattcgcatctcca

SEQ ID NO: 9123 - DNA, 26 bp, Homo sapiens
gttcctatttatattcgcatctccac

SEQ ID NO: 9124 - DNA, 26 bp, Homo sapiens
ttcctatttatattcgcatctccacg

SEQ ID NO: 9125 - DNA, 26 bp, Homo sapiens
tcctatttatattcgcatctccacgg

SEQ ID NO: 9126 - DNA, 26 bp, Homo sapiens
cctatttatattcgcatctccacggc

SEQ ID NO: 9127 - DNA, 26 bp, Homo sapiens
ctatttatattcgcatctccacggcc

SEQ ID NO: 9128 - DNA, 26 bp, Homo sapiens
tatttatattcgcatctccacggcct

SEQ ID NO: 9129 - DNA, 26 bp, Homo sapiens
atttatattcgcatctccacggcctg

SEQ ID NO: 9130 - DNA, 26 bp, Homo sapiens
tttatattcgcatctccacggcctgg

SEQ ID NO: 9131 - DNA, 26 bp, Homo sapiens
ttatattcgcatctccacggcctggc

SEQ ID NO: 9132 - DNA, 26 bp, Homo sapiens
tatattcgcatctccacggcctggca

SEQ ID NO: 9133 - DNA, 26 bp, Homo sapiens
atattcgcatctccacggcctggcaa

SEQ ID NO: 9134 - DNA, 26 bp, Homo sapiens
tattcgcatctccacggcctggcaat

SEQ ID NO: 9135 - DNA, 26 bp, Homo sapiens
attcgcatctccacggcctggcaata

SEQ ID NO: 9136 - DNA, 26 bp, Homo sapiens
ttcgcatctccacggcctggcaatat

SEQ ID NO: 9137 - DNA, 26 bp, Homo sapiens
tcgcatctccacggcctggcaatatg

SEQ ID NO: 9138 - DNA, 26 bp, Homo sapiens
cgcatctccacggcctggcaatatgc

SEQ ID NO: 9139 - DNA, 26 bp, Homo sapiens
gcatctccacggcctggcaatatgcc

SEQ ID NO: 9140 - DNA, 26 bp, Homo sapiens
catctccacggcctggcaatatgcct

SEQ ID NO: 9141 - DNA, 26 bp, Homo sapiens
atctccacggcctggcaatatgccta

SEQ ID NO: 9142 - DNA, 26 bp, Homo sapiens
tctccacggcctggcaatatgcctac

SEQ ID NO: 9143 - DNA, 26 bp, Homo sapiens
ctccacggcctggcaatatgcctacc

SEQ ID NO: 9144 - DNA, 26 bp, Homo sapiens
tccacggcctggcaatatgcctacca

SEQ ID NO: 9145 - DNA, 26 bp, Homo sapiens
ccacggcctggcaatatgcctaccac

SEQ ID NO: 9146 - DNA, 26 bp, Homo sapiens
cacggcctggcaatatgcctaccaca

SEQ ID NO: 9147 - DNA, 26 bp, Homo sapiens
acggcctggcaatatgcctaccacat

SEQ ID NO: 9148 - DNA, 26 bp, Homo sapiens
cggcctggcaatatgcctaccacata

SEQ ID NO: 9149 - DNA, 26 bp, Homo sapiens
ggcctggcaatatgcctaccacataa

SEQ ID NO: 9150 - DNA, 26 bp, Homo sapiens
gcctggcaatatgcctaccacataat

SEQ ID NO: 9151 - DNA, 26 bp, Homo sapiens
cctggcaatatgcctaccacataatg

SEQ ID NO: 9152 - DNA, 26 bp, Homo sapiens
ctggcaatatgcctaccacataatgt

SEQ ID NO: 9153 - DNA, 26 bp, Homo sapiens
tggcaatatgcctaccacataatgtc

SEQ ID NO: 9154 - DNA, 26 bp, Homo sapiens
ggcaatatgcctaccacataatgtcc

SEQ ID NO: 9155 - DNA, 26 bp, Homo sapiens
gcaatatgcctaccacataatgtcct

SEQ ID NO: 9156 - DNA, 26 bp, Homo sapiens
caatatgcctaccacataatgtcctg

SEQ ID NO: 9157 - DNA, 26 bp, Homo sapiens
aatatgcctaccacataatgtcctgt

SEQ ID NO: 9158 - DNA, 26 bp, Homo sapiens
atatgcctaccacataatgtcctgtt

SEQ ID NO: 9159 - DNA, 26 bp, Homo sapiens
tatgcctaccacataatgtcctgtta

SEQ ID NO: 9160 - DNA, 26 bp, Homo sapiens
atgcctaccacataatgtcctgttag

SEQ ID NO: 9161 - DNA, 26 bp, Homo sapiens
tgcctaccacataatgtcctgttaga

SEQ ID NO: 9162 - DNA, 26 bp, Homo sapiens
gcctaccacataatgtcctgttagat

SEQ ID NO: 9163 - DNA, 26 bp, Homo sapiens
cctaccacataatgtcctgttagatg

SEQ ID NO: 9164 - DNA, 26 bp, Homo sapiens
ctaccacataatgtcctgttagatgt

SEQ ID NO: 9165 - DNA, 26 bp, Homo sapiens
taccacataatgtcctgttagatgtt

SEQ ID NO: 9166 - DNA, 26 bp, Homo sapiens
accacataatgtcctgttagatgttt

SEQ ID NO: 9167 - DNA, 26 bp, Homo sapiens
ccacataatgtcctgttagatgtttg

SEQ ID NO: 9168 - DNA, 26 bp, Homo sapiens
cacataatgtcctgttagatgtttgt

SEQ ID NO: 9169 - DNA, 26 bp, Homo sapiens
acataatgtcctgttagatgtttgtt

SEQ ID NO: 9170 - DNA, 26 bp, Homo sapiens
cataatgtcctgttagatgtttgttg

SEQ ID NO: 9171 - DNA, 26 bp, Homo sapiens
ataatgtcctgttagatgtttgttga

SEQ ID NO: 9172 - DNA, 26 bp, Homo sapiens
taatgtcctgttagatgtttgttgat

SEQ ID NO: 9173 - DNA, 26 bp, Homo sapiens
aatgtcctgttagatgtttgttgatt

SEQ ID NO: 9174 - DNA, 26 bp, Homo sapiens
atgtcctgttagatgtttgttgattg

SEQ ID NO: 9175 - DNA, 26 bp, Homo sapiens
tgtcctgttagatgtttgttgattga

SEQ ID NO: 9176 - DNA, 26 bp, Homo sapiens
gtcctgttagatgtttgttgattgaa

SEQ ID NO: 9177 - DNA, 26 bp, Homo sapiens
tcctgttagatgtttgttgattgaac

SEQ ID NO: 9178 - DNA, 26 bp, Homo sapiens
cctgttagatgtttgttgattgaaca

SEQ ID NO: 9179 - DNA, 26 bp, Homo sapiens
ctgttagatgtttgttgattgaacag

SEQ ID NO: 9180 - DNA, 26 bp, Homo sapiens
tgttagatgtttgttgattgaacagg

SEQ ID NO: 9181 - DNA, 26 bp, Homo sapiens
gttagatgtttgttgattgaacaggc

SEQ ID NO: 9182 - DNA, 26 bp, Homo sapiens
ttagatgtttgttgattgaacaggca

SEQ ID NO: 9183 - DNA, 26 bp, Homo sapiens
tagatgtttgttgattgaacaggcat

SEQ ID NO: 9184 - DNA, 26 bp, Homo sapiens
agatgtttgttgattgaacaggcatt

SEQ ID NO: 9185 - DNA, 26 bp, Homo sapiens
gatgtttgttgattgaacaggcattg

SEQ ID NO: 9186 - DNA, 26 bp, Homo sapiens
atgtttgttgattgaacaggcattga

SEQ ID NO: 9187 - DNA, 26 bp, Homo sapiens
tgtttgttgattgaacaggcattgat

SEQ ID NO: 9188 - DNA, 26 bp, Homo sapiens
gtttgttgattgaacaggcattgatt

SEQ ID NO: 9189 - DNA, 26 bp, Homo sapiens
tttgttgattgaacaggcattgattg

SEQ ID NO: 9190 - DNA, 26 bp, Homo sapiens
ttgttgattgaacaggcattgattgg

SEQ ID NO: 9191 - DNA, 26 bp, Homo sapiens
tgttgattgaacaggcattgattggg

SEQ ID NO: 9192 - DNA, 26 bp, Homo sapiens
gttgattgaacaggcattgattgggg

SEQ ID NO: 9193 - DNA, 26 bp, Homo sapiens
ttgattgaacaggcattgattgggga

SEQ ID NO: 9194 - DNA, 26 bp, Homo sapiens
tgattgaacaggcattgattggggat

SEQ ID NO: 9195 - DNA, 26 bp, Homo sapiens
gattgaacaggcattgattggggatt

SEQ ID NO: 9196 - DNA, 26 bp, Homo sapiens
attgaacaggcattgattggggattt

SEQ ID NO: 9197 - DNA, 26 bp, Homo sapiens
ttgaacaggcattgattggggatttg

SEQ ID NO: 9198 - DNA, 26 bp, Homo sapiens
tgaacaggcattgattggggatttgg

SEQ ID NO: 9199 - DNA, 26 bp, Homo sapiens
gaacaggcattgattggggatttggg

SEQ ID NO: 9200 - DNA, 26 bp, Homo sapiens
aacaggcattgattggggatttgggt

SEQ ID NO: 9201 - DNA, 26 bp, Homo sapiens
acaggcattgattggggatttgggtg

SEQ ID NO: 9202 - DNA, 26 bp, Homo sapiens
caggcattgattggggatttgggtgc

SEQ ID NO: 9203 - DNA, 26 bp, Homo sapiens
aggcattgattggggatttgggtgcc

SEQ ID NO: 9204 - DNA, 26 bp, Homo sapiens
ggcattgattggggatttgggtgcca

SEQ ID NO: 9205 - DNA, 26 bp, Homo sapiens
gcattgattggggatttgggtgccac

SEQ ID NO: 9206 - DNA, 26 bp, Homo sapiens
cattgattggggatttgggtgccacc

SEQ ID NO: 9207 - DNA, 26 bp, Homo sapiens
attgattggggatttgggtgccaccc

SEQ ID NO: 9208 - DNA, 26 bp, Homo sapiens
ttgattggggatttgggtgccaccct

SEQ ID NO: 9209 - DNA, 26 bp, Homo sapiens
tgattggggatttgggtgccaccctt

SEQ ID NO: 9210 - DNA, 26 bp, Homo sapiens
gattggggatttgggtgccacccttc

SEQ ID NO: 9211 - DNA, 26 bp, Homo sapiens
attggggatttgggtgccacccttca

SEQ ID NO: 9212 - DNA, 26 bp, Homo sapiens
ttggggatttgggtgccacccttcat

SEQ ID NO: 9213 - DNA, 26 bp, Homo sapiens
tggggatttgggtgccacccttcatt

SEQ ID NO: 9214 - DNA, 26 bp, Homo sapiens
tcctcttgaaaactttaatgaaacca

SEQ ID NO: 9215 - DNA, 26 bp, Homo sapiens
cctcttgaaaactttaatgaaaccaa

SEQ ID NO: 9216 - DNA, 26 bp, Homo sapiens
ctcttgaaaactttaatgaaaccaat

SEQ ID NO: 9217 - DNA, 26 bp, Homo sapiens
tcttgaaaactttaatgaaaccaata

SEQ ID NO: 9218 - DNA, 26 bp, Homo sapiens
cttgaaaactttaatgaaaccaataa

SEQ ID NO: 9219 - DNA, 26 bp, Homo sapiens
ttgaaaactttaatgaaaccaataag

SEQ ID NO: 9220 - DNA, 26 bp, Homo sapiens
tgaaaactttaatgaaaccaataagt

SEQ ID NO: 9221 - DNA, 26 bp, Homo sapiens
gaaaactttaatgaaaccaataagtt

SEQ ID NO: 9222 - DNA, 26 bp, Homo sapiens
aaaactttaatgaaaccaataagtta

SEQ ID NO: 9223 - DNA, 26 bp, Homo sapiens
aaactttaatgaaaccaataagttaa

SEQ ID NO: 9224 - DNA, 26 bp, Homo sapiens
aactttaatgaaaccaataagttaat

SEQ ID NO: 9225 - DNA, 26 bp, Homo sapiens
actttaatgaaaccaataagttaata

SEQ ID NO: 9226 - DNA, 26 bp, Homo sapiens
ctttaatgaaaccaataagttaataa

SEQ ID NO: 9227 - DNA, 26 bp, Homo sapiens
tttaatgaaaccaataagttaataag

SEQ ID NO: 9228 - DNA, 26 bp, Homo sapiens
ttaatgaaaccaataagttaataagt

SEQ ID NO: 9229 - DNA, 26 bp, Homo sapiens
taatgaaaccaataagttaataagtt

SEQ ID NO: 9230 - DNA, 26 bp, Homo sapiens
aatgaaaccaataagttaataagtta

SEQ ID NO: 9231 - DNA, 26 bp, Homo sapiens
atgaaaccaataagttaataagttaa

SEQ ID NO: 9232 - DNA, 26 bp, Homo sapiens
tgaaaccaataagttaataagttaac

SEQ ID NO: 9233 - DNA, 26 bp, Homo sapiens
gaaaccaataagttaataagttaaca

SEQ ID NO: 9234 - DNA, 26 bp, Homo sapiens
aaaccaataagttaataagttaacaa

SEQ ID NO: 9235 - DNA, 26 bp, Homo sapiens
aaccaataagttaataagttaacaaa

SEQ ID NO: 9236 - DNA, 26 bp, Homo sapiens
accaataagttaataagttaacaaag

SEQ ID NO: 9237 - DNA, 26 bp, Homo sapiens
ccaataagttaataagttaacaaagt

SEQ ID NO: 9238 - DNA, 26 bp, Homo sapiens
caataagttaataagttaacaaagtg

SEQ ID NO: 9239 - DNA, 26 bp, Homo sapiens
aataagttaataagttaacaaagtga

SEQ ID NO: 9240 - DNA, 26 bp, Homo sapiens
ataagttaataagttaacaaagtgag

SEQ ID NO: 9241 - DNA, 26 bp, Homo sapiens
taagttaataagttaacaaagtgagg

SEQ ID NO: 9242 - DNA, 26 bp, Homo sapiens
aagttaataagttaacaaagtgaggt

SEQ ID NO: 9243 - DNA, 26 bp, Homo sapiens
agttaataagttaacaaagtgaggta

SEQ ID NO: 9244 - DNA, 26 bp, Homo sapiens
gttaataagttaacaaagtgaggtac

SEQ ID NO: 9245 - DNA, 26 bp, Homo sapiens
ttaataagttaacaaagtgaggtact

SEQ ID NO: 9246 - DNA, 26 bp, Homo sapiens
taataagttaacaaagtgaggtactt

SEQ ID NO: 9247 - DNA, 26 bp, Homo sapiens
aataagttaacaaagtgaggtacttg

SEQ ID NO: 9248 - DNA, 26 bp, Homo sapiens
ataagttaacaaagtgaggtacttgc

SEQ ID NO: 9249 - DNA, 26 bp, Homo sapiens
taagttaacaaagtgaggtacttgca

SEQ ID NO: 9250 - DNA, 26 bp, Homo sapiens
aagttaacaaagtgaggtacttgcat

SEQ ID NO: 9251 - DNA, 26 bp, Homo sapiens
agttaacaaagtgaggtacttgcata

SEQ ID NO: 9252 - DNA, 26 bp, Homo sapiens
gttaacaaagtgaggtacttgcatat

SEQ ID NO: 9253 - DNA, 26 bp, Homo sapiens
ttaacaaagtgaggtacttgcatatc

SEQ ID NO: 9254 - DNA, 26 bp, Homo sapiens
taacaaagtgaggtacttgcatatcc

SEQ ID NO: 9255 - DNA, 26 bp, Homo sapiens
aacaaagtgaggtacttgcatatccg

SEQ ID NO: 9256 - DNA, 26 bp, Homo sapiens
acaaagtgaggtacttgcatatccga

SEQ ID NO: 9257 - DNA, 26 bp, Homo sapiens
caaagtgaggtacttgcatatccgag

SEQ ID NO: 9258 - DNA, 26 bp, Homo sapiens
aaagtgaggtacttgcatatccgaga

SEQ ID NO: 9259 - DNA, 26 bp, Homo sapiens
aagtgaggtacttgcatatccgagaa

SEQ ID NO: 9260 - DNA, 26 bp, Homo sapiens
agtgaggtacttgcatatccgagaac

SEQ ID NO: 9261 - DNA, 26 bp, Homo sapiens
gtgaggtacttgcatatccgagaacc

SEQ ID NO: 9262 - DNA, 26 bp, Homo sapiens
tgaggtacttgcatatccgagaaccg

SEQ ID NO: 9263 - DNA, 26 bp, Homo sapiens
gaggtacttgcatatccgagaaccga

SEQ ID NO: 9264 - DNA, 26 bp, Homo sapiens
aggtacttgcatatccgagaaccgag

SEQ ID NO: 9265 - DNA, 26 bp, Homo sapiens
ggtacttgcatatccgagaaccgagt

SEQ ID NO: 9266 - DNA, 26 bp, Homo sapiens
gtacttgcatatccgagaaccgagtt

SEQ ID NO: 9267 - DNA, 26 bp, Homo sapiens
tacttgcatatccgagaaccgagttg

SEQ ID NO: 9268 - DNA, 26 bp, Homo sapiens
acttgcatatccgagaaccgagttga

SEQ ID NO: 9269 - DNA, 26 bp, Homo sapiens
cttgcatatccgagaaccgagttgat

SEQ ID NO: 9270 - DNA, 26 bp, Homo sapiens
ttgcatatccgagaaccgagttgatg

SEQ ID NO: 9271 - DNA, 26 bp, Homo sapiens
tgcatatccgagaaccgagttgatgg

SEQ ID NO: 9272 - DNA, 26 bp, Homo sapiens
gcatatccgagaaccgagttgatggc

SEQ ID NO: 9273 - DNA, 26 bp, Homo sapiens
catatccgagaaccgagttgatggcg

SEQ ID NO: 9274 - DNA, 26 bp, Homo sapiens
atatccgagaaccgagttgatggcgg

SEQ ID NO: 9275 - DNA, 26 bp, Homo sapiens
tatccgagaaccgagttgatggcgga

SEQ ID NO: 9276 - DNA, 26 bp, Homo sapiens
atccgagaaccgagttgatggcggaa

SEQ ID NO: 9277 - DNA, 26 bp, Homo sapiens
tccgagaaccgagttgatggcggaac

SEQ ID NO: 9278 - DNA, 26 bp, Homo sapiens
ccgagaaccgagttgatggcggaacc

SEQ ID NO: 9279 - DNA, 26 bp, Homo sapiens
cgagaaccgagttgatggcggaacct

SEQ ID NO: 9280 - DNA, 26 bp, Homo sapiens
gagaaccgagttgatggcggaacctc

SEQ ID NO: 9281 - DNA, 26 bp, Homo sapiens
agaaccgagttgatggcggaacctcg

SEQ ID NO: 9282 - DNA, 26 bp, Homo sapiens
gaaccgagttgatggcggaacctcga

SEQ ID NO: 9283 - DNA, 26 bp, Homo sapiens
aaccgagttgatggcggaacctcgat

SEQ ID NO: 9284 - DNA, 26 bp, Homo sapiens
accgagttgatggcggaacctcgatc

SEQ ID NO: 9285 - DNA, 26 bp, Homo sapiens
ccgagttgatggcggaacctcgatcg

SEQ ID NO: 9286 - DNA, 26 bp, Homo sapiens
cgagttgatggcggaacctcgatcgt

SEQ ID NO: 9287 - DNA, 26 bp, Homo sapiens
gagttgatggcggaacctcgatcgtg

SEQ ID NO: 9288 - DNA, 26 bp, Homo sapiens
agttgatggcggaacctcgatcgtgg

SEQ ID NO: 9289 - DNA, 26 bp, Homo sapiens
gttgatggcggaacctcgatcgtgga

SEQ ID NO: 9290 - DNA, 26 bp, Homo sapiens
ttgatggcggaacctcgatcgtggaa

SEQ ID NO: 9291 - DNA, 26 bp, Homo sapiens
tgatggcggaacctcgatcgtggaag

SEQ ID NO: 9292 - DNA, 26 bp, Homo sapiens
gatggcggaacctcgatcgtggaagg

SEQ ID NO: 9293 - DNA, 26 bp, Homo sapiens
atggcggaacctcgatcgtggaagga

SEQ ID NO: 9294 - DNA, 26 bp, Homo sapiens
tggcggaacctcgatcgtggaaggaa

SEQ ID NO: 9295 - DNA, 26 bp, Homo sapiens
ggcggaacctcgatcgtggaaggaag

SEQ ID NO: 9296 - DNA, 26 bp, Homo sapiens
gcggaacctcgatcgtggaaggaagg

SEQ ID NO: 9297 - DNA, 26 bp, Homo sapiens
cggaacctcgatcgtggaaggaagga

SEQ ID NO: 9298 - DNA, 26 bp, Homo sapiens
ggaacctcgatcgtggaaggaaggag

SEQ ID NO: 9299 - DNA, 26 bp, Homo sapiens
gaacctcgatcgtggaaggaaggagg

SEQ ID NO: 9300 - DNA, 26 bp, Homo sapiens
aacctcgatcgtggaaggaaggaggg

SEQ ID NO: 9301 - DNA, 26 bp, Homo sapiens
acctcgatcgtggaaggaaggagggc

SEQ ID NO: 9302 - DNA, 26 bp, Homo sapiens
cctcgatcgtggaaggaaggagggct

SEQ ID NO: 9303 - DNA, 26 bp, Homo sapiens
ctcgatcgtggaaggaaggagggctt

SEQ ID NO: 9304 - DNA, 26 bp, Homo sapiens
tcgatcgtggaaggaaggagggcttc

SEQ ID NO: 9305 - DNA, 26 bp, Homo sapiens
cgatcgtggaaggaaggagggcttct

SEQ ID NO: 9306 - DNA, 26 bp, Homo sapiens
gatcgtggaaggaaggagggcttctt

SEQ ID NO: 9307 - DNA, 26 bp, Homo sapiens
atcgtggaaggaaggagggcttcttc

SEQ ID NO: 9308 - DNA, 26 bp, Homo sapiens
tcgtggaaggaaggagggcttcttcc

SEQ ID NO: 9309 - DNA, 26 bp, Homo sapiens
cgtggaaggaaggagggcttcttccc

SEQ ID NO: 9310 - DNA, 26 bp, Homo sapiens
gtggaaggaaggagggcttcttccca

SEQ ID NO: 9311 - DNA, 26 bp, Homo sapiens
tggaaggaaggagggcttcttcccat

SEQ ID NO: 9312 - DNA, 26 bp, Homo sapiens
ggaaggaaggagggcttcttcccatg

SEQ ID NO: 9313 - DNA, 26 bp, Homo sapiens
gaaggaaggagggcttcttcccatgt

SEQ ID NO: 9314 - DNA, 26 bp, Homo sapiens
aaggaaggagggcttcttcccatgtc

SEQ ID NO: 9315 - DNA, 26 bp, Homo sapiens
aggaaggagggcttcttcccatgtct

SEQ ID NO: 9316 - DNA, 26 bp, Homo sapiens
ggaaggagggcttcttcccatgtctc

SEQ ID NO: 9317 - DNA, 26 bp, Homo sapiens
gaaggagggcttcttcccatgtctcc

SEQ ID NO: 9318 - DNA, 26 bp, Homo sapiens
aaggagggcttcttcccatgtctcct

SEQ ID NO: 9319 - DNA, 26 bp, Homo sapiens
aggagggcttcttcccatgtctcctt

SEQ ID NO: 9320 - DNA, 26 bp, Homo sapiens
ggagggcttcttcccatgtctccttg

SEQ ID NO: 9321 - DNA, 26 bp, Homo sapiens
gagggcttcttcccatgtctccttgg

SEQ ID NO: 9322 - DNA, 26 bp, Homo sapiens
agggcttcttcccatgtctccttggt

SEQ ID NO: 9323 - DNA, 26 bp, Homo sapiens
gggcttcttcccatgtctccttggtc

SEQ ID NO: 9324 - DNA, 26 bp, Homo sapiens
ggcttcttcccatgtctccttggtca

SEQ ID NO: 9325 - DNA, 26 bp, Homo sapiens
gcttcttcccatgtctccttggtcat

SEQ ID NO: 9326 - DNA, 26 bp, Homo sapiens
cttcttcccatgtctccttggtcata

SEQ ID NO: 9327 - DNA, 26 bp, Homo sapiens
ttcttcccatgtctccttggtcatag

SEQ ID NO: 9328 - DNA, 26 bp, Homo sapiens
tcttcccatgtctccttggtcatagg

SEQ ID NO: 9329 - DNA, 26 bp, Homo sapiens
cttcccatgtctccttggtcataggg

SEQ ID NO: 9330 - DNA, 26 bp, Homo sapiens
ttcccatgtctccttggtcatagggt

SEQ ID NO: 9331 - DNA, 26 bp, Homo sapiens
tcccatgtctccttggtcatagggta

SEQ ID NO: 9332 - DNA, 26 bp, Homo sapiens
cccatgtctccttggtcatagggtaa

SEQ ID NO: 9333 - DNA, 26 bp, Homo sapiens
ccatgtctccttggtcatagggtaat

SEQ ID NO: 9334 - DNA, 26 bp, Homo sapiens
catgtctccttggtcatagggtaatc

SEQ ID NO: 9335 - DNA, 26 bp, Homo sapiens
atgtctccttggtcatagggtaatcc

SEQ ID NO: 9336 - DNA, 26 bp, Homo sapiens
tgtctccttggtcatagggtaatccc

SEQ ID NO: 9337 - DNA, 26 bp, Homo sapiens
gtctccttggtcatagggtaatccca

SEQ ID NO: 9338 - DNA, 26 bp, Homo sapiens
tctccttggtcatagggtaatcccat

SEQ ID NO: 9339 - DNA, 26 bp, Homo sapiens
ctccttggtcatagggtaatcccatt

SEQ ID NO: 9340 - DNA, 26 bp, Homo sapiens
tccttggtcatagggtaatcccattc

SEQ ID NO: 9341 - DNA, 26 bp, Homo sapiens
ccttggtcatagggtaatcccattct

SEQ ID NO: 9342 - DNA, 26 bp, Homo sapiens
cttggtcatagggtaatcccattctc

SEQ ID NO: 9343 - DNA, 26 bp, Homo sapiens
ttggtcatagggtaatcccattctcc

SEQ ID NO: 9344 - DNA, 26 bp, Homo sapiens
tggtcatagggtaatcccattctcct

SEQ ID NO: 9345 - DNA, 26 bp, Homo sapiens
ggtcatagggtaatcccattctcctg

SEQ ID NO: 9346 - DNA, 26 bp, Homo sapiens
gtcatagggtaatcccattctcctgg

SEQ ID NO: 9347 - DNA, 26 bp, Homo sapiens
tcatagggtaatcccattctcctggc

SEQ ID NO: 9348 - DNA, 26 bp, Homo sapiens
catagggtaatcccattctcctggcc

SEQ ID NO: 9349 - DNA, 26 bp, Homo sapiens
atagggtaatcccattctcctggccc

SEQ ID NO: 9350 - DNA, 26 bp, Homo sapiens
tagggtaatcccattctcctggccct

SEQ ID NO: 9351 - DNA, 26 bp, Homo sapiens
agggtaatcccattctcctggccctc

SEQ ID NO: 9352 - DNA, 26 bp, Homo sapiens
gggtaatcccattctcctggccctct

SEQ ID NO: 9353 - DNA, 26 bp, Homo sapiens
ggtaatcccattctcctggccctctc

SEQ ID NO: 9354 - DNA, 26 bp, Homo sapiens
gtaatcccattctcctggccctctcc

SEQ ID NO: 9355 - DNA, 26 bp, Homo sapiens
taatcccattctcctggccctctcca

SEQ ID NO: 9356 - DNA, 26 bp, Homo sapiens
aatcccattctcctggccctctccac

SEQ ID NO: 9357 - DNA, 26 bp, Homo sapiens
atcccattctcctggccctctccaca

SEQ ID NO: 9358 - DNA, 26 bp, Homo sapiens
tcccattctcctggccctctccacag

SEQ ID NO: 9359 - DNA, 26 bp, Homo sapiens
cccattctcctggccctctccacagc

SEQ ID NO: 9360 - DNA, 26 bp, Homo sapiens
ccattctcctggccctctccacagct

SEQ ID NO: 9361 - DNA, 26 bp, Homo sapiens
cattctcctggccctctccacagctg

SEQ ID NO: 9362 - DNA, 26 bp, Homo sapiens
attctcctggccctctccacagctgt

SEQ ID NO: 9363 - DNA, 26 bp, Homo sapiens
ttctcctggccctctccacagctgtc

SEQ ID NO: 9364 - DNA, 26 bp, Homo sapiens
tctcctggccctctccacagctgtct

SEQ ID NO: 9365 - DNA, 26 bp, Homo sapiens
ctcctggccctctccacagctgtctc

SEQ ID NO: 9366 - DNA, 26 bp, Homo sapiens
tcctggccctctccacagctgtctct

SEQ ID NO: 9367 - DNA, 26 bp, Homo sapiens
cctggccctctccacagctgtctctg

SEQ ID NO: 9368 - DNA, 26 bp, Homo sapiens
ctggccctctccacagctgtctctga

SEQ ID NO: 9369 - DNA, 26 bp, Homo sapiens
tggccctctccacagctgtctctgag

SEQ ID NO: 9370 - DNA, 26 bp, Homo sapiens
ggccctctccacagctgtctctgagt

SEQ ID NO: 9371 - DNA, 26 bp, Homo sapiens
gccctctccacagctgtctctgagtg

SEQ ID NO: 9372 - DNA, 26 bp, Homo sapiens
ccctctccacagctgtctctgagtgg

SEQ ID NO: 9373 - DNA, 26 bp, Homo sapiens
cctctccacagctgtctctgagtggg

SEQ ID NO: 9374 - DNA, 26 bp, Homo sapiens
ctctccacagctgtctctgagtgggt

SEQ ID NO: 9375 - DNA, 26 bp, Homo sapiens
tctccacagctgtctctgagtgggtg

SEQ ID NO: 9376 - DNA, 26 bp, Homo sapiens
ctccacagctgtctctgagtgggtgg

SEQ ID NO: 9377 - DNA, 26 bp, Homo sapiens
tccacagctgtctctgagtgggtgga

SEQ ID NO: 9378 - DNA, 26 bp, Homo sapiens
ccacagctgtctctgagtgggtggag

SEQ ID NO: 9379 - DNA, 26 bp, Homo sapiens
cacagctgtctctgagtgggtggagg

SEQ ID NO: 9380 - DNA, 26 bp, Homo sapiens
acagctgtctctgagtgggtggaggg

SEQ ID NO: 9381 - DNA, 26 bp, Homo sapiens
cagctgtctctgagtgggtggagggg

SEQ ID NO: 9382 - DNA, 26 bp, Homo sapiens
agctgtctctgagtgggtggaggggt

SEQ ID NO: 9383 - DNA, 26 bp, Homo sapiens
gctgtctctgagtgggtggaggggtg

SEQ ID NO: 9384 - DNA, 26 bp, Homo sapiens
ctgtctctgagtgggtggaggggtgg

SEQ ID NO: 9385 - DNA, 26 bp, Homo sapiens
tgtctctgagtgggtggaggggtggc

SEQ ID NO: 9386 - DNA, 26 bp, Homo sapiens
gtctctgagtgggtggaggggtggct

SEQ ID NO: 9387 - DNA, 26 bp, Homo sapiens
tctctgagtgggtggaggggtggctc

SEQ ID NO: 9388 - DNA, 26 bp, Homo sapiens
ctctgagtgggtggaggggtggctct

SEQ ID NO: 9389 - DNA, 26 bp, Homo sapiens
tctgagtgggtggaggggtggctctc

SEQ ID NO: 9390 - DNA, 26 bp, Homo sapiens
ctgagtgggtggaggggtggctctct

SEQ ID NO: 9391 - DNA, 26 bp, Homo sapiens
tgagtgggtggaggggtggctctctg

SEQ ID NO: 9392 - DNA, 26 bp, Homo sapiens
gagtgggtggaggggtggctctctgg

SEQ ID NO: 9393 - DNA, 26 bp, Homo sapiens
agtgggtggaggggtggctctctggg

SEQ ID NO: 9394 - DNA, 26 bp, Homo sapiens
gtgggtggaggggtggctctctgggg

SEQ ID NO: 9395 - DNA, 26 bp, Homo sapiens
tgggtggaggggtggctctctgggga

SEQ ID NO: 9396 - DNA, 26 bp, Homo sapiens
gggtggaggggtggctctctggggac

SEQ ID NO: 9397 - DNA, 26 bp, Homo sapiens
ggtggaggggtggctctctggggaca

SEQ ID NO: 9398 - DNA, 26 bp, Homo sapiens
gtggaggggtggctctctggggacag

SEQ ID NO: 9399 - DNA, 26 bp, Homo sapiens
tggaggggtggctctctggggacagt

SEQ ID NO: 9400 - DNA, 26 bp, Homo sapiens
ggaggggtggctctctggggacagtg

SEQ ID NO: 9401 - DNA, 26 bp, Homo sapiens
gaggggtggctctctggggacagtgc

SEQ ID NO: 9402 - DNA, 26 bp, Homo sapiens
aggggtggctctctggggacagtgca

SEQ ID NO: 9403 - DNA, 26 bp, Homo sapiens
ggggtggctctctggggacagtgcag

SEQ ID NO: 9404 - DNA, 26 bp, Homo sapiens
gggtggctctctggggacagtgcagt

SEQ ID NO: 9405 - DNA, 26 bp, Homo sapiens
ggtggctctctggggacagtgcagtg

SEQ ID NO: 9406 - DNA, 26 bp, Homo sapiens
gtggctctctggggacagtgcagtgc

SEQ ID NO: 9407 - DNA, 26 bp, Homo sapiens
tggctctctggggacagtgcagtgca

SEQ ID NO: 9408 - DNA, 26 bp, Homo sapiens
ggctctctggggacagtgcagtgcag

SEQ ID NO: 9409 - DNA, 26 bp, Homo sapiens
gctctctggggacagtgcagtgcagg

SEQ ID NO: 9410 - DNA, 26 bp, Homo sapiens
ctctctggggacagtgcagtgcaggt

SEQ ID NO: 9411 - DNA, 26 bp, Homo sapiens
tctctggggacagtgcagtgcaggtg

SEQ ID NO: 9412 - DNA, 26 bp, Homo sapiens
ctctggggacagtgcagtgcaggtgg

SEQ ID NO: 9413 - DNA, 26 bp, Homo sapiens
tctggggacagtgcagtgcaggtggg

SEQ ID NO: 9414 - DNA, 26 bp, Homo sapiens
ctggggacagtgcagtgcaggtgggg

SEQ ID NO: 9415 - DNA, 26 bp, Homo sapiens
tggggacagtgcagtgcaggtggggt

SEQ ID NO: 9416 - DNA, 26 bp, Homo sapiens
ggggacagtgcagtgcaggtggggtg

SEQ ID NO: 9417 - DNA, 26 bp, Homo sapiens
gggacagtgcagtgcaggtggggtga

SEQ ID NO: 9418 - DNA, 26 bp, Homo sapiens
ggacagtgcagtgcaggtggggtgag

SEQ ID NO: 9419 - DNA, 26 bp, Homo sapiens
gacagtgcagtgcaggtggggtgagc

SEQ ID NO: 9420 - DNA, 26 bp, Homo sapiens
acagtgcagtgcaggtggggtgagcc

SEQ ID NO: 9421 - DNA, 26 bp, Homo sapiens
cagtgcagtgcaggtggggtgagcca

SEQ ID NO: 9422 - DNA, 26 bp, Homo sapiens
agtgcagtgcaggtggggtgagccag

SEQ ID NO: 9423 - DNA, 26 bp, Homo sapiens
gtgcagtgcaggtggggtgagccagg

SEQ ID NO: 9424 - DNA, 26 bp, Homo sapiens
tgcagtgcaggtggggtgagccagga

SEQ ID NO: 9425 - DNA, 26 bp, Homo sapiens
gcagtgcaggtggggtgagccaggag

SEQ ID NO: 9426 - DNA, 26 bp, Homo sapiens
cagtgcaggtggggtgagccaggagt

SEQ ID NO: 9427 - DNA, 26 bp, Homo sapiens
agtgcaggtggggtgagccaggagtg

SEQ ID NO: 9428 - DNA, 26 bp, Homo sapiens
gtgcaggtggggtgagccaggagtgg

SEQ ID NO: 9429 - DNA, 26 bp, Homo sapiens
tgcaggtggggtgagccaggagtggc

SEQ ID NO: 9430 - DNA, 26 bp, Homo sapiens
gcaggtggggtgagccaggagtggct

SEQ ID NO: 9431 - DNA, 26 bp, Homo sapiens
caggtggggtgagccaggagtggctc

SEQ ID NO: 9432 - DNA, 26 bp, Homo sapiens
aggtggggtgagccaggagtggctcc

SEQ ID NO: 9433 - DNA, 26 bp, Homo sapiens
ggtggggtgagccaggagtggctcca

SEQ ID NO: 9434 - DNA, 26 bp, Homo sapiens
gtggggtgagccaggagtggctccat

SEQ ID NO: 9435 - DNA, 26 bp, Homo sapiens
tggggtgagccaggagtggctccatc

SEQ ID NO: 9436 - DNA, 26 bp, Homo sapiens
ggggtgagccaggagtggctccatcc

SEQ ID NO: 9437 - DNA, 26 bp, Homo sapiens
gggtgagccaggagtggctccatcca

SEQ ID NO: 9438 - DNA, 26 bp, Homo sapiens
ggtgagccaggagtggctccatccag

SEQ ID NO: 9439 - DNA, 26 bp, Homo sapiens
gtgagccaggagtggctccatccagg

SEQ ID NO: 9440 - DNA, 26 bp, Homo sapiens
tgagccaggagtggctccatccaggg

SEQ ID NO: 9441 - DNA, 26 bp, Homo sapiens
gagccaggagtggctccatccagggc

SEQ ID NO: 9442 - DNA, 26 bp, Homo sapiens
agccaggagtggctccatccagggca

SEQ ID NO: 9443 - DNA, 26 bp, Homo sapiens
gccaggagtggctccatccagggcat

SEQ ID NO: 9444 - DNA, 26 bp, Homo sapiens
ccaggagtggctccatccagggcatg

SEQ ID NO: 9445 - DNA, 26 bp, Homo sapiens
caggagtggctccatccagggcatga

SEQ ID NO: 9446 - DNA, 26 bp, Homo sapiens
aggagtggctccatccagggcatgac

SEQ ID NO: 9447 - DNA, 26 bp, Homo sapiens
ggagtggctccatccagggcatgacg

SEQ ID NO: 9448 - DNA, 26 bp, Homo sapiens
gagtggctccatccagggcatgacgg

SEQ ID NO: 9449 - DNA, 26 bp, Homo sapiens
agtggctccatccagggcatgacggt

SEQ ID NO: 9450 - DNA, 26 bp, Homo sapiens
gtggctccatccagggcatgacggtc

SEQ ID NO: 9451 - DNA, 26 bp, Homo sapiens
tggctccatccagggcatgacggtca

SEQ ID NO: 9452 - DNA, 26 bp, Homo sapiens
ggctccatccagggcatgacggtcac

SEQ ID NO: 9453 - DNA, 26 bp, Homo sapiens
gctccatccagggcatgacggtcaca

SEQ ID NO: 9454 - DNA, 26 bp, Homo sapiens
ctccatccagggcatgacggtcacat

SEQ ID NO: 9455 - DNA, 26 bp, Homo sapiens
tccatccagggcatgacggtcacatg

SEQ ID NO: 9456 - DNA, 26 bp, Homo sapiens
ccatccagggcatgacggtcacatgc

SEQ ID NO: 9457 - DNA, 26 bp, Homo sapiens
catccagggcatgacggtcacatgca

SEQ ID NO: 9458 - DNA, 26 bp, Homo sapiens
atccagggcatgacggtcacatgcag

SEQ ID NO: 9459 - DNA, 26 bp, Homo sapiens
tccagggcatgacggtcacatgcaga

SEQ ID NO: 9460 - DNA, 26 bp, Homo sapiens
ccagggcatgacggtcacatgcagag

SEQ ID NO: 9461 - DNA, 26 bp, Homo sapiens
cagggcatgacggtcacatgcagagg

SEQ ID NO: 9462 - DNA, 26 bp, Homo sapiens
agggcatgacggtcacatgcagaggg

SEQ ID NO: 9463 - DNA, 26 bp, Homo sapiens
gggcatgacggtcacatgcagagggc

SEQ ID NO: 9464 - DNA, 26 bp, Homo sapiens
ggcatgacggtcacatgcagagggca

SEQ ID NO: 9465 - DNA, 26 bp, Homo sapiens
gcatgacggtcacatgcagagggcat

SEQ ID NO: 9466 - DNA, 26 bp, Homo sapiens
catgacggtcacatgcagagggcatg

SEQ ID NO: 9467 - DNA, 26 bp, Homo sapiens
atgacggtcacatgcagagggcatgt

SEQ ID NO: 9468 - DNA, 26 bp, Homo sapiens
tgacggtcacatgcagagggcatgtt

SEQ ID NO: 9469 - DNA, 26 bp, Homo sapiens
gacggtcacatgcagagggcatgttg

SEQ ID NO: 9470 - DNA, 26 bp, Homo sapiens
acggtcacatgcagagggcatgttgg

SEQ ID NO: 9471 - DNA, 26 bp, Homo sapiens
cggtcacatgcagagggcatgttggg

SEQ ID NO: 9472 - DNA, 26 bp, Homo sapiens
ggtcacatgcagagggcatgttgggg

SEQ ID NO: 9473 - DNA, 26 bp, Homo sapiens
gtcacatgcagagggcatgttggggc

SEQ ID NO: 9474 - DNA, 26 bp, Homo sapiens
tcacatgcagagggcatgttggggca

SEQ ID NO: 9475 - DNA, 26 bp, Homo sapiens
cacatgcagagggcatgttggggcag

SEQ ID NO: 9476 - DNA, 26 bp, Homo sapiens
acatgcagagggcatgttggggcaga

SEQ ID NO: 9477 - DNA, 26 bp, Homo sapiens
catgcagagggcatgttggggcagag

SEQ ID NO: 9478 - DNA, 26 bp, Homo sapiens
atgcagagggcatgttggggcagagg

SEQ ID NO: 9479 - DNA, 26 bp, Homo sapiens
tgcagagggcatgttggggcagaggc

SEQ ID NO: 9480 - DNA, 26 bp, Homo sapiens
gcagagggcatgttggggcagaggct

SEQ ID NO: 9481 - DNA, 26 bp, Homo sapiens
cagagggcatgttggggcagaggctg

SEQ ID NO: 9482 - DNA, 26 bp, Homo sapiens
agagggcatgttggggcagaggctgg

SEQ ID NO: 9483 - DNA, 26 bp, Homo sapiens
gagggcatgttggggcagaggctggg

SEQ ID NO: 9484 - DNA, 26 bp, Homo sapiens
agggcatgttggggcagaggctgggc

SEQ ID NO: 9485 - DNA, 26 bp, Homo sapiens
gggcatgttggggcagaggctgggca

SEQ ID NO: 9486 - DNA, 26 bp, Homo sapiens
ggcatgttggggcagaggctgggcac

SEQ ID NO: 9487 - DNA, 26 bp, Homo sapiens
gcatgttggggcagaggctgggcacc

SEQ ID NO: 9488 - DNA, 26 bp, Homo sapiens
catgttggggcagaggctgggcacca

SEQ ID NO: 9489 - DNA, 26 bp, Homo sapiens
atgttggggcagaggctgggcaccat

SEQ ID NO: 9490 - DNA, 26 bp, Homo sapiens
tgttggggcagaggctgggcaccatg

SEQ ID NO: 9491 - DNA, 26 bp, Homo sapiens
gttggggcagaggctgggcaccatgg

SEQ ID NO: 9492 - DNA, 26 bp, Homo sapiens
ttggggcagaggctgggcaccatgga

SEQ ID NO: 9493 - DNA, 26 bp, Homo sapiens
tggggcagaggctgggcaccatggac

SEQ ID NO: 9494 - DNA, 26 bp, Homo sapiens
ggggcagaggctgggcaccatggact

SEQ ID NO: 9495 - DNA, 26 bp, Homo sapiens
gggcagaggctgggcaccatggactg

SEQ ID NO: 9496 - DNA, 26 bp, Homo sapiens
ggcagaggctgggcaccatggactga

SEQ ID NO: 9497 - DNA, 26 bp, Homo sapiens
gcagaggctgggcaccatggactgag

SEQ ID NO: 9498 - DNA, 26 bp, Homo sapiens
cagaggctgggcaccatggactgagt

SEQ ID NO: 9499 - DNA, 26 bp, Homo sapiens
agaggctgggcaccatggactgagta

SEQ ID NO: 9500 - DNA, 26 bp, Homo sapiens
gaggctgggcaccatggactgagtaa

SEQ ID NO: 9501 - DNA, 26 bp, Homo sapiens
aggctgggcaccatggactgagtaag

SEQ ID NO: 9502 - DNA, 26 bp, Homo sapiens
ggctgggcaccatggactgagtaaga

SEQ ID NO: 9503 - DNA, 26 bp, Homo sapiens
gctgggcaccatggactgagtaagat

SEQ ID NO: 9504 - DNA, 26 bp, Homo sapiens
ctgggcaccatggactgagtaagatc

SEQ ID NO: 9505 - DNA, 26 bp, Homo sapiens
tgggcaccatggactgagtaagatcc

SEQ ID NO: 9506 - DNA, 26 bp, Homo sapiens
gggcaccatggactgagtaagatcca

SEQ ID NO: 9507 - DNA, 26 bp, Homo sapiens
ggcaccatggactgagtaagatccag

SEQ ID NO: 9508 - DNA, 26 bp, Homo sapiens
gcaccatggactgagtaagatccagt

SEQ ID NO: 9509 - DNA, 26 bp, Homo sapiens
caccatggactgagtaagatccagtc

SEQ ID NO: 9510 - DNA, 26 bp, Homo sapiens
accatggactgagtaagatccagtcc

SEQ ID NO: 9511 - DNA, 26 bp, Homo sapiens
ccatggactgagtaagatccagtcca

SEQ ID NO: 9512 - DNA, 26 bp, Homo sapiens
catggactgagtaagatccagtccaa

SEQ ID NO: 9513 - DNA, 26 bp, Homo sapiens
atggactgagtaagatccagtccaag

SEQ ID NO: 9514 - DNA, 26 bp, Homo sapiens
tggactgagtaagatccagtccaagc

SEQ ID NO: 9515 - DNA, 26 bp, Homo sapiens
ggactgagtaagatccagtccaagcc

SEQ ID NO: 9516 - DNA, 26 bp, Homo sapiens
gactgagtaagatccagtccaagccc

SEQ ID NO: 9517 - DNA, 26 bp, Homo sapiens
actgagtaagatccagtccaagccct

SEQ ID NO: 9518 - DNA, 26 bp, Homo sapiens
ctgagtaagatccagtccaagccctg

SEQ ID NO: 9519 - DNA, 26 bp, Homo sapiens
tgagtaagatccagtccaagccctgg

SEQ ID NO: 9520 - DNA, 26 bp, Homo sapiens
gagtaagatccagtccaagccctggt

SEQ ID NO: 9521 - DNA, 26 bp, Homo sapiens
agtaagatccagtccaagccctggtg

SEQ ID NO: 9522 - DNA, 26 bp, Homo sapiens
gtaagatccagtccaagccctggtgc

SEQ ID NO: 9523 - DNA, 26 bp, Homo sapiens
taagatccagtccaagccctggtgct

SEQ ID NO: 9524 - DNA, 26 bp, Homo sapiens
aagatccagtccaagccctggtgctg

SEQ ID NO: 9525 - DNA, 26 bp, Homo sapiens
agatccagtccaagccctggtgctgg

SEQ ID NO: 9526 - DNA, 26 bp, Homo sapiens
gatccagtccaagccctggtgctggc

SEQ ID NO: 9527 - DNA, 26 bp, Homo sapiens
atccagtccaagccctggtgctggcg

SEQ ID NO: 9528 - DNA, 26 bp, Homo sapiens
tccagtccaagccctggtgctggcgc

SEQ ID NO: 9529 - DNA, 26 bp, Homo sapiens
ccagtccaagccctggtgctggcgca

SEQ ID NO: 9530 - DNA, 26 bp, Homo sapiens
cagtccaagccctggtgctggcgcat

SEQ ID NO: 9531 - DNA, 26 bp, Homo sapiens
agtccaagccctggtgctggcgcatg

SEQ ID NO: 9532 - DNA, 26 bp, Homo sapiens
gtccaagccctggtgctggcgcatgc

SEQ ID NO: 9533 - DNA, 26 bp, Homo sapiens
tccaagccctggtgctggcgcatgca

SEQ ID NO: 9534 - DNA, 26 bp, Homo sapiens
ccaagccctggtgctggcgcatgcag

SEQ ID NO: 9535 - DNA, 26 bp, Homo sapiens
caagccctggtgctggcgcatgcagg

SEQ ID NO: 9536 - DNA, 26 bp, Homo sapiens
aagccctggtgctggcgcatgcaggt

SEQ ID NO: 9537 - DNA, 26 bp, Homo sapiens
agccctggtgctggcgcatgcaggtc

SEQ ID NO: 9538 - DNA, 26 bp, Homo sapiens
gccctggtgctggcgcatgcaggtcc

SEQ ID NO: 9539 - DNA, 26 bp, Homo sapiens
ccctggtgctggcgcatgcaggtccc

SEQ ID NO: 9540 - DNA, 26 bp, Homo sapiens
cctggtgctggcgcatgcaggtcccc

SEQ ID NO: 9541 - DNA, 26 bp, Homo sapiens
ctggtgctggcgcatgcaggtcccca

SEQ ID NO: 9542 - DNA, 26 bp, Homo sapiens
tggtgctggcgcatgcaggtccccag

SEQ ID NO: 9543 - DNA, 26 bp, Homo sapiens
ggtgctggcgcatgcaggtccccagc

SEQ ID NO: 9544 - DNA, 26 bp, Homo sapiens
gtgctggcgcatgcaggtccccagca

SEQ ID NO: 9545 - DNA, 26 bp, Homo sapiens
tgctggcgcatgcaggtccccagcac

SEQ ID NO: 9546 - DNA, 26 bp, Homo sapiens
gctggcgcatgcaggtccccagcacg

SEQ ID NO: 9547 - DNA, 26 bp, Homo sapiens
ctggcgcatgcaggtccccagcacga

SEQ ID NO: 9548 - DNA, 26 bp, Homo sapiens
tggcgcatgcaggtccccagcacgag

SEQ ID NO: 9549 - DNA, 26 bp, Homo sapiens
ggcgcatgcaggtccccagcacgaga

SEQ ID NO: 9550 - DNA, 26 bp, Homo sapiens
gcgcatgcaggtccccagcacgagat

SEQ ID NO: 9551 - DNA, 26 bp, Homo sapiens
cgcatgcaggtccccagcacgagatg

SEQ ID NO: 9552 - DNA, 26 bp, Homo sapiens
gcatgcaggtccccagcacgagatgc

SEQ ID NO: 9553 - DNA, 26 bp, Homo sapiens
catgcaggtccccagcacgagatgca

SEQ ID NO: 9554 - DNA, 26 bp, Homo sapiens
atgcaggtccccagcacgagatgcag

SEQ ID NO: 9555 - DNA, 26 bp, Homo sapiens
tgcaggtccccagcacgagatgcagg

SEQ ID NO: 9556 - DNA, 26 bp, Homo sapiens
gcaggtccccagcacgagatgcaggc

SEQ ID NO: 9557 - DNA, 26 bp, Homo sapiens
caggtccccagcacgagatgcaggca

SEQ ID NO: 9558 - DNA, 26 bp, Homo sapiens
aggtccccagcacgagatgcaggcag

SEQ ID NO: 9559 - DNA, 26 bp, Homo sapiens
ggtccccagcacgagatgcaggcagc

SEQ ID NO: 9560 - DNA, 26 bp, Homo sapiens
gtccccagcacgagatgcaggcagcg

SEQ ID NO: 9561 - DNA, 26 bp, Homo sapiens
tccccagcacgagatgcaggcagcgt

SEQ ID NO: 9562 - DNA, 26 bp, Homo sapiens
ccccagcacgagatgcaggcagcgtg

SEQ ID NO: 9563 - DNA, 26 bp, Homo sapiens
cccagcacgagatgcaggcagcgtgg

SEQ ID NO: 9564 - DNA, 26 bp, Homo sapiens
ccagcacgagatgcaggcagcgtggc

SEQ ID NO: 9565 - DNA, 26 bp, Homo sapiens
cagcacgagatgcaggcagcgtggcc

SEQ ID NO: 9566 - DNA, 26 bp, Homo sapiens
agcacgagatgcaggcagcgtggcct

SEQ ID NO: 9567 - DNA, 26 bp, Homo sapiens
gcacgagatgcaggcagcgtggcctc

SEQ ID NO: 9568 - DNA, 26 bp, Homo sapiens
cacgagatgcaggcagcgtggcctcg

SEQ ID NO: 9569 - DNA, 26 bp, Homo sapiens
acgagatgcaggcagcgtggcctcgg

SEQ ID NO: 9570 - DNA, 26 bp, Homo sapiens
cgagatgcaggcagcgtggcctcggc

SEQ ID NO: 9571 - DNA, 26 bp, Homo sapiens
gagatgcaggcagcgtggcctcggcc

SEQ ID NO: 9572 - DNA, 26 bp, Homo sapiens
agatgcaggcagcgtggcctcggccc

SEQ ID NO: 9573 - DNA, 26 bp, Homo sapiens
gatgcaggcagcgtggcctcggcccc

SEQ ID NO: 9574 - DNA, 26 bp, Homo sapiens
atgcaggcagcgtggcctcggcccct

SEQ ID NO: 9575 - DNA, 26 bp, Homo sapiens
tgcaggcagcgtggcctcggcccctt

SEQ ID NO: 9576 - DNA, 26 bp, Homo sapiens
gcaggcagcgtggcctcggccccttg

SEQ ID NO: 9577 - DNA, 26 bp, Homo sapiens
caggcagcgtggcctcggccccttgt

SEQ ID NO: 9578 - DNA, 26 bp, Homo sapiens
aggcagcgtggcctcggccccttgtt

SEQ ID NO: 9579 - DNA, 26 bp, Homo sapiens
ggcagcgtggcctcggccccttgttc

SEQ ID NO: 9580 - DNA, 26 bp, Homo sapiens
gcagcgtggcctcggccccttgttcc

SEQ ID NO: 9581 - DNA, 26 bp, Homo sapiens
cagcgtggcctcggccccttgttccc

SEQ ID NO: 9582 - DNA, 26 bp, Homo sapiens
agcgtggcctcggccccttgttccca

SEQ ID NO: 9583 - DNA, 26 bp, Homo sapiens
gcgtggcctcggccccttgttcccac

SEQ ID NO: 9584 - DNA, 26 bp, Homo sapiens
cgtggcctcggccccttgttcccaca

SEQ ID NO: 9585 - DNA, 26 bp, Homo sapiens
gtggcctcggccccttgttcccacag

SEQ ID NO: 9586 - DNA, 26 bp, Homo sapiens
tggcctcggccccttgttcccacaga

SEQ ID NO: 9587 - DNA, 26 bp, Homo sapiens
ggcctcggccccttgttcccacagag

SEQ ID NO: 9588 - DNA, 26 bp, Homo sapiens
gcctcggccccttgttcccacagagg

SEQ ID NO: 9589 - DNA, 26 bp, Homo sapiens
cctcggccccttgttcccacagaggg

SEQ ID NO: 9590 - DNA, 26 bp, Homo sapiens
ctcggccccttgttcccacagagggt

SEQ ID NO: 9591 - DNA, 26 bp, Homo sapiens
tcggccccttgttcccacagagggtt

SEQ ID NO: 9592 - DNA, 26 bp, Homo sapiens
cggccccttgttcccacagagggttg

SEQ ID NO: 9593 - DNA, 26 bp, Homo sapiens
ggccccttgttcccacagagggttgc

SEQ ID NO: 9594 - DNA, 26 bp, Homo sapiens
gccccttgttcccacagagggttgcc

SEQ ID NO: 9595 - DNA, 26 bp, Homo sapiens
ccccttgttcccacagagggttgcca

SEQ ID NO: 9596 - DNA, 26 bp, Homo sapiens
cccttgttcccacagagggttgccat

SEQ ID NO: 9597 - DNA, 26 bp, Homo sapiens
ccttgttcccacagagggttgccatt

SEQ ID NO: 9598 - DNA, 26 bp, Homo sapiens
cttgttcccacagagggttgccattg

SEQ ID NO: 9599 - DNA, 26 bp, Homo sapiens
ttgttcccacagagggttgccattgg

SEQ ID NO: 9600 - DNA, 26 bp, Homo sapiens
tgttcccacagagggttgccattggt

SEQ ID NO: 9601 - DNA, 26 bp, Homo sapiens
gttcccacagagggttgccattggtc

SEQ ID NO: 9602 - DNA, 26 bp, Homo sapiens
ttcccacagagggttgccattggtcc

SEQ ID NO: 9603 - DNA, 26 bp, Homo sapiens
tcccacagagggttgccattggtcca

SEQ ID NO: 9604 - DNA, 26 bp, Homo sapiens
cccacagagggttgccattggtccac

SEQ ID NO: 9605 - DNA, 26 bp, Homo sapiens
ccacagagggttgccattggtccact

SEQ ID NO: 9606 - DNA, 26 bp, Homo sapiens
cacagagggttgccattggtccacta

SEQ ID NO: 9607 - DNA, 26 bp, Homo sapiens
acagagggttgccattggtccactac

SEQ ID NO: 9608 - DNA, 26 bp, Homo sapiens
cagagggttgccattggtccactacc

SEQ ID NO: 9609 - DNA, 26 bp, Homo sapiens
agagggttgccattggtccactaccc

SEQ ID NO: 9610 - DNA, 26 bp, Homo sapiens
gagggttgccattggtccactacccc

SEQ ID NO: 9611 - DNA, 26 bp, Homo sapiens
agggttgccattggtccactacccct

SEQ ID NO: 9612 - DNA, 26 bp, Homo sapiens
gggttgccattggtccactacccctc

SEQ ID NO: 9613 - DNA, 26 bp, Homo sapiens
ggttgccattggtccactacccctca

SEQ ID NO: 9614 - DNA, 26 bp, Homo sapiens
gttgccattggtccactacccctcac

SEQ ID NO: 9615 - DNA, 26 bp, Homo sapiens
ttgccattggtccactacccctcacc

SEQ ID NO: 9616 - DNA, 26 bp, Homo sapiens
tgccattggtccactacccctcacct

SEQ ID NO: 9617 - DNA, 26 bp, Homo sapiens
gccattggtccactacccctcacctt

SEQ ID NO: 9618 - DNA, 26 bp, Homo sapiens
ccattggtccactacccctcaccttc

SEQ ID NO: 9619 - DNA, 26 bp, Homo sapiens
cattggtccactacccctcaccttcc

SEQ ID NO: 9620 - DNA, 26 bp, Homo sapiens
attggtccactacccctcaccttcct

SEQ ID NO: 9621 - DNA, 26 bp, Homo sapiens
ttggtccactacccctcaccttcctg

SEQ ID NO: 9622 - DNA, 26 bp, Homo sapiens
tggtccactacccctcaccttcctgc

SEQ ID NO: 9623 - DNA, 26 bp, Homo sapiens
ggtccactacccctcaccttcctgcc

SEQ ID NO: 9624 - DNA, 26 bp, Homo sapiens
gtccactacccctcaccttcctgcca

SEQ ID NO: 9625 - DNA, 26 bp, Homo sapiens
tccactacccctcaccttcctgccac

SEQ ID NO: 9626 - DNA, 26 bp, Homo sapiens
ccactacccctcaccttcctgccacc

SEQ ID NO: 9627 - DNA, 26 bp, Homo sapiens
cactacccctcaccttcctgccacct

SEQ ID NO: 9628 - DNA, 26 bp, Homo sapiens
actacccctcaccttcctgccacctg

SEQ ID NO: 9629 - DNA, 26 bp, Homo sapiens
ctacccctcaccttcctgccacctgc

SEQ ID NO: 9630 - DNA, 26 bp, Homo sapiens
tacccctcaccttcctgccacctgca

SEQ ID NO: 9631 - DNA, 26 bp, Homo sapiens
acccctcaccttcctgccacctgcat

SEQ ID NO: 9632 - DNA, 26 bp, Homo sapiens
cccctcaccttcctgccacctgcatt

SEQ ID NO: 9633 - DNA, 26 bp, Homo sapiens
ccctcaccttcctgccacctgcattg

SEQ ID NO: 9634 - DNA, 26 bp, Homo sapiens
cctcaccttcctgccacctgcattgg

SEQ ID NO: 9635 - DNA, 26 bp, Homo sapiens
ctcaccttcctgccacctgcattggc

SEQ ID NO: 9636 - DNA, 26 bp, Homo sapiens
tcaccttcctgccacctgcattggct

SEQ ID NO: 9637 - DNA, 26 bp, Homo sapiens
caccttcctgccacctgcattggctt

SEQ ID NO: 9638 - DNA, 26 bp, Homo sapiens
accttcctgccacctgcattggcttt

SEQ ID NO: 9639 - DNA, 26 bp, Homo sapiens
ccttcctgccacctgcattggctttg

SEQ ID NO: 9640 - DNA, 26 bp, Homo sapiens
cttcctgccacctgcattggctttgc

SEQ ID NO: 9641 - DNA, 26 bp, Homo sapiens
ttcctgccacctgcattggctttgca

SEQ ID NO: 9642 - DNA, 26 bp, Homo sapiens
tcctgccacctgcattggctttgcag

SEQ ID NO: 9643 - DNA, 26 bp, Homo sapiens
cctgccacctgcattggctttgcaga

SEQ ID NO: 9644 - DNA, 26 bp, Homo sapiens
ctgccacctgcattggctttgcagaa

SEQ ID NO: 9645 - DNA, 26 bp, Homo sapiens
tgccacctgcattggctttgcagaag

SEQ ID NO: 9646 - DNA, 26 bp, Homo sapiens
gccacctgcattggctttgcagaaga

SEQ ID NO: 9647 - DNA, 26 bp, Homo sapiens
ccacctgcattggctttgcagaagag

SEQ ID NO: 9648 - DNA, 26 bp, Homo sapiens
cacctgcattggctttgcagaagagg

SEQ ID NO: 9649 - DNA, 26 bp, Homo sapiens
acctgcattggctttgcagaagagga

SEQ ID NO: 9650 - DNA, 26 bp, Homo sapiens
cctgcattggctttgcagaagaggag

SEQ ID NO: 9651 - DNA, 26 bp, Homo sapiens
ctgcattggctttgcagaagaggagc

SEQ ID NO: 9652 - DNA, 26 bp, Homo sapiens
tgcattggctttgcagaagaggagca

SEQ ID NO: 9653 - DNA, 26 bp, Homo sapiens
gcattggctttgcagaagaggagcaa

SEQ ID NO: 9654 - DNA, 26 bp, Homo sapiens
cattggctttgcagaagaggagcaaa

SEQ ID NO: 9655 - DNA, 26 bp, Homo sapiens
attggctttgcagaagaggagcaaag

SEQ ID NO: 9656 - DNA, 26 bp, Homo sapiens
ttggctttgcagaagaggagcaaagg

SEQ ID NO: 9657 - DNA, 26 bp, Homo sapiens
tggctttgcagaagaggagcaaaggg

SEQ ID NO: 9658 - DNA, 26 bp, Homo sapiens
ggctttgcagaagaggagcaaagggg

SEQ ID NO: 9659 - DNA, 26 bp, Homo sapiens
gctttgcagaagaggagcaaaggggt

SEQ ID NO: 9660 - DNA, 26 bp, Homo sapiens
ctttgcagaagaggagcaaaggggtg

SEQ ID NO: 9661 - DNA, 26 bp, Homo sapiens
tttgcagaagaggagcaaaggggtgg

SEQ ID NO: 9662 - DNA, 26 bp, Homo sapiens
ttgcagaagaggagcaaaggggtggg

SEQ ID NO: 9663 - DNA, 26 bp, Homo sapiens
tgcagaagaggagcaaaggggtgggg

SEQ ID NO: 9664 - DNA, 26 bp, Homo sapiens
gcagaagaggagcaaaggggtgggga

SEQ ID NO: 9665 - DNA, 26 bp, Homo sapiens
cagaagaggagcaaaggggtggggat

SEQ ID NO: 9666 - DNA, 26 bp, Homo sapiens
agaagaggagcaaaggggtggggata

SEQ ID NO: 9667 - DNA, 26 bp, Homo sapiens
gaagaggagcaaaggggtggggataa

SEQ ID NO: 9668 - DNA, 26 bp, Homo sapiens
aagaggagcaaaggggtggggataag

SEQ ID NO: 9669 - DNA, 26 bp, Homo sapiens
agaggagcaaaggggtggggataaga

SEQ ID NO: 9670 - DNA, 26 bp, Homo sapiens
gaggagcaaaggggtggggataagaa

SEQ ID NO: 9671 - DNA, 26 bp, Homo sapiens
aggagcaaaggggtggggataagaaa

SEQ ID NO: 9672 - DNA, 26 bp, Homo sapiens
ggagcaaaggggtggggataagaaag

SEQ ID NO: 9673 - DNA, 26 bp, Homo sapiens
gagcaaaggggtggggataagaaagt

SEQ ID NO: 9674 - DNA, 26 bp, Homo sapiens
agcaaaggggtggggataagaaagtg

SEQ ID NO: 9675 - DNA, 26 bp, Homo sapiens
gcaaaggggtggggataagaaagtgt

SEQ ID NO: 9676 - DNA, 26 bp, Homo sapiens
caaaggggtggggataagaaagtgtt

SEQ ID NO: 9677 - DNA, 26 bp, Homo sapiens
aaaggggtggggataagaaagtgttc

SEQ ID NO: 9678 - DNA, 26 bp, Homo sapiens
aaggggtggggataagaaagtgttcc

SEQ ID NO: 9679 - DNA, 26 bp, Homo sapiens
aggggtggggataagaaagtgttcct

SEQ ID NO: 9680 - DNA, 26 bp, Homo sapiens
ggggtggggataagaaagtgttcctg

SEQ ID NO: 9681 - DNA, 26 bp, Homo sapiens
gggtggggataagaaagtgttcctgg

SEQ ID NO: 9682 - DNA, 26 bp, Homo sapiens
ggtggggataagaaagtgttcctgga

SEQ ID NO: 9683 - DNA, 26 bp, Homo sapiens
gtggggataagaaagtgttcctggag

SEQ ID NO: 9684 - DNA, 26 bp, Homo sapiens
tggggataagaaagtgttcctggagt

SEQ ID NO: 9685 - DNA, 26 bp, Homo sapiens
ggggataagaaagtgttcctggagtg

SEQ ID NO: 9686 - DNA, 26 bp, Homo sapiens
gggataagaaagtgttcctggagtga

SEQ ID NO: 9687 - DNA, 26 bp, Homo sapiens
ggataagaaagtgttcctggagtgaa

SEQ ID NO: 9688 - DNA, 26 bp, Homo sapiens
gataagaaagtgttcctggagtgaat

SEQ ID NO: 9689 - DNA, 26 bp, Homo sapiens
ataagaaagtgttcctggagtgaatg

SEQ ID NO: 9690 - DNA, 26 bp, Homo sapiens
taagaaagtgttcctggagtgaatgg

SEQ ID NO: 9691 - DNA, 26 bp, Homo sapiens
aagaaagtgttcctggagtgaatggg

SEQ ID NO: 9692 - DNA, 26 bp, Homo sapiens
agaaagtgttcctggagtgaatgggg

SEQ ID NO: 9693 - DNA, 26 bp, Homo sapiens
gaaagtgttcctggagtgaatggggg

SEQ ID NO: 9694 - DNA, 26 bp, Homo sapiens
aaagtgttcctggagtgaatgggggc

SEQ ID NO: 9695 - DNA, 26 bp, Homo sapiens
aagtgttcctggagtgaatgggggct

SEQ ID NO: 9696 - DNA, 26 bp, Homo sapiens
agtgttcctggagtgaatgggggctg

SEQ ID NO: 9697 - DNA, 26 bp, Homo sapiens
gtgttcctggagtgaatgggggctga

SEQ ID NO: 9698 - DNA, 26 bp, Homo sapiens
tgttcctggagtgaatgggggctgac

SEQ ID NO: 9699 - DNA, 26 bp, Homo sapiens
gttcctggagtgaatgggggctgacg

SEQ ID NO: 9700 - DNA, 26 bp, Homo sapiens
ttcctggagtgaatgggggctgacgc

SEQ ID NO: 9701 - DNA, 26 bp, Homo sapiens
tcctggagtgaatgggggctgacgcc

SEQ ID NO: 9702 - DNA, 26 bp, Homo sapiens
cctggagtgaatgggggctgacgcct

SEQ ID NO: 9703 - DNA, 26 bp, Homo sapiens
ctggagtgaatgggggctgacgcctg

SEQ ID NO: 9704 - DNA, 26 bp, Homo sapiens
tggagtgaatgggggctgacgcctgg

SEQ ID NO: 9705 - DNA, 26 bp, Homo sapiens
ggagtgaatgggggctgacgcctgga

SEQ ID NO: 9706 - DNA, 26 bp, Homo sapiens
gagtgaatgggggctgacgcctggat

SEQ ID NO: 9707 - DNA, 26 bp, Homo sapiens
agtgaatgggggctgacgcctggatg

SEQ ID NO: 9708 - DNA, 26 bp, Homo sapiens
gtgaatgggggctgacgcctggatgt

SEQ ID NO: 9709 - DNA, 26 bp, Homo sapiens
tgaatgggggctgacgcctggatgtg

SEQ ID NO: 9710 - DNA, 26 bp, Homo sapiens
gaatgggggctgacgcctggatgtgg

SEQ ID NO: 9711 - DNA, 26 bp, Homo sapiens
aatgggggctgacgcctggatgtggc

SEQ ID NO: 9712 - DNA, 26 bp, Homo sapiens
atgggggctgacgcctggatgtggcg

SEQ ID NO: 9713 - DNA, 26 bp, Homo sapiens
tgggggctgacgcctggatgtggcgc

SEQ ID NO: 9714 - DNA, 26 bp, Homo sapiens
gggggctgacgcctggatgtggcgct

SEQ ID NO: 9715 - DNA, 26 bp, Homo sapiens
ggggctgacgcctggatgtggcgctg

SEQ ID NO: 9716 - DNA, 26 bp, Homo sapiens
gggctgacgcctggatgtggcgctgc

SEQ ID NO: 9717 - DNA, 26 bp, Homo sapiens
ggctgacgcctggatgtggcgctgcc

SEQ ID NO: 9718 - DNA, 26 bp, Homo sapiens
gctgacgcctggatgtggcgctgcca

SEQ ID NO: 9719 - DNA, 26 bp, Homo sapiens
ctgacgcctggatgtggcgctgccaa

SEQ ID NO: 9720 - DNA, 26 bp, Homo sapiens
tgacgcctggatgtggcgctgccaat

SEQ ID NO: 9721 - DNA, 26 bp, Homo sapiens
gacgcctggatgtggcgctgccaatt

SEQ ID NO: 9722 - DNA, 26 bp, Homo sapiens
acgcctggatgtggcgctgccaattg

SEQ ID NO: 9723 - DNA, 26 bp, Homo sapiens
cgcctggatgtggcgctgccaattga

SEQ ID NO: 9724 - DNA, 26 bp, Homo sapiens
gcctggatgtggcgctgccaattgaa

SEQ ID NO: 9725 - DNA, 26 bp, Homo sapiens
cctggatgtggcgctgccaattgaag

SEQ ID NO: 9726 - DNA, 26 bp, Homo sapiens
ctggatgtggcgctgccaattgaagt

SEQ ID NO: 9727 - DNA, 26 bp, Homo sapiens
tggatgtggcgctgccaattgaagtg

SEQ ID NO: 9728 - DNA, 26 bp, Homo sapiens
ggatgtggcgctgccaattgaagtga

SEQ ID NO: 9729 - DNA, 26 bp, Homo sapiens
gatgtggcgctgccaattgaagtgaa

SEQ ID NO: 9730 - DNA, 26 bp, Homo sapiens
atgtggcgctgccaattgaagtgaag

SEQ ID NO: 9731 - DNA, 26 bp, Homo sapiens
tgtggcgctgccaattgaagtgaaga

SEQ ID NO: 9732 - DNA, 26 bp, Homo sapiens
gtggcgctgccaattgaagtgaagaa

SEQ ID NO: 9733 - DNA, 26 bp, Homo sapiens
tggcgctgccaattgaagtgaagaag

SEQ ID NO: 9734 - DNA, 26 bp, Homo sapiens
ggcgctgccaattgaagtgaagaagt

SEQ ID NO: 9735 - DNA, 26 bp, Homo sapiens
gcgctgccaattgaagtgaagaagtg

SEQ ID NO: 9736 - DNA, 26 bp, Homo sapiens
cgctgccaattgaagtgaagaagtgg

SEQ ID NO: 9737 - DNA, 26 bp, Homo sapiens
gctgccaattgaagtgaagaagtggg

SEQ ID NO: 9738 - DNA, 26 bp, Homo sapiens
ctgccaattgaagtgaagaagtgggg

SEQ ID NO: 9739 - DNA, 26 bp, Homo sapiens
tgccaattgaagtgaagaagtggggt

SEQ ID NO: 9740 - DNA, 26 bp, Homo sapiens
gccaattgaagtgaagaagtggggtg

SEQ ID NO: 9741 - DNA, 26 bp, Homo sapiens
ccaattgaagtgaagaagtggggtgt

SEQ ID NO: 9742 - DNA, 26 bp, Homo sapiens
caattgaagtgaagaagtggggtgtg

SEQ ID NO: 9743 - DNA, 26 bp, Homo sapiens
aattgaagtgaagaagtggggtgtgg

SEQ ID NO: 9744 - DNA, 26 bp, Homo sapiens
attgaagtgaagaagtggggtgtgga

SEQ ID NO: 9745 - DNA, 26 bp, Homo sapiens
ttgaagtgaagaagtggggtgtggag

SEQ ID NO: 9746 - DNA, 26 bp, Homo sapiens
tgaagtgaagaagtggggtgtggagg

SEQ ID NO: 9747 - DNA, 26 bp, Homo sapiens
gaagtgaagaagtggggtgtggaggg

SEQ ID NO: 9748 - DNA, 26 bp, Homo sapiens
aagtgaagaagtggggtgtggaggga

SEQ ID NO: 9749 - DNA, 26 bp, Homo sapiens
agtgaagaagtggggtgtggagggag

SEQ ID NO: 9750 - DNA, 26 bp, Homo sapiens
gtgaagaagtggggtgtggagggagg

SEQ ID NO: 9751 - DNA, 26 bp, Homo sapiens
tgaagaagtggggtgtggagggaggg

SEQ ID NO: 9752 - DNA, 26 bp, Homo sapiens
gaagaagtggggtgtggagggagggg

SEQ ID NO: 9753 - DNA, 26 bp, Homo sapiens
aagaagtggggtgtggagggagggga

SEQ ID NO: 9754 - DNA, 26 bp, Homo sapiens
agaagtggggtgtggagggaggggag

SEQ ID NO: 9755 - DNA, 26 bp, Homo sapiens
gaagtggggtgtggagggaggggaga

SEQ ID NO: 9756 - DNA, 26 bp, Homo sapiens
aagtggggtgtggagggaggggagac

SEQ ID NO: 9757 - DNA, 26 bp, Homo sapiens
agtggggtgtggagggaggggagaca

SEQ ID NO: 9758 - DNA, 26 bp, Homo sapiens
gtggggtgtggagggaggggagacag

SEQ ID NO: 9759 - DNA, 26 bp, Homo sapiens
tggggtgtggagggaggggagacagt

SEQ ID NO: 9760 - DNA, 26 bp, Homo sapiens
ggggtgtggagggaggggagacagtg

SEQ ID NO: 9761 - DNA, 26 bp, Homo sapiens
gggtgtggagggaggggagacagtgc

SEQ ID NO: 9762 - DNA, 26 bp, Homo sapiens
ggtgtggagggaggggagacagtgca

SEQ ID NO: 9763 - DNA, 26 bp, Homo sapiens
gtgtggagggaggggagacagtgcat

SEQ ID NO: 9764 - DNA, 26 bp, Homo sapiens
tgtggagggaggggagacagtgcatg

SEQ ID NO: 9765 - DNA, 26 bp, Homo sapiens
gtggagggaggggagacagtgcatgt

SEQ ID NO: 9766 - DNA, 26 bp, Homo sapiens
tggagggaggggagacagtgcatgtg

SEQ ID NO: 9767 - DNA, 26 bp, Homo sapiens
ggagggaggggagacagtgcatgtga

SEQ ID NO: 9768 - DNA, 26 bp, Homo sapiens
gagggaggggagacagtgcatgtgaa

SEQ ID NO: 9769 - DNA, 26 bp, Homo sapiens
agggaggggagacagtgcatgtgaaa

SEQ ID NO: 9770 - DNA, 26 bp, Homo sapiens
gggaggggagacagtgcatgtgaaag

SEQ ID NO: 9771 - DNA, 26 bp, Homo sapiens
ggaggggagacagtgcatgtgaaagc

SEQ ID NO: 9772 - DNA, 26 bp, Homo sapiens
gaggggagacagtgcatgtgaaagcc

SEQ ID NO: 9773 - DNA, 26 bp, Homo sapiens
aggggagacagtgcatgtgaaagccg

SEQ ID NO: 9774 - DNA, 26 bp, Homo sapiens
ggggagacagtgcatgtgaaagccgg

SEQ ID NO: 9775 - DNA, 26 bp, Homo sapiens
gggagacagtgcatgtgaaagccgga

SEQ ID NO: 9776 - DNA, 26 bp, Homo sapiens
ggagacagtgcatgtgaaagccggat

SEQ ID NO: 9777 - DNA, 26 bp, Homo sapiens
gagacagtgcatgtgaaagccggatg

SEQ ID NO: 9778 - DNA, 26 bp, Homo sapiens
agacagtgcatgtgaaagccggatgc

SEQ ID NO: 9779 - DNA, 26 bp, Homo sapiens
gacagtgcatgtgaaagccggatgcg

SEQ ID NO: 9780 - DNA, 26 bp, Homo sapiens
acagtgcatgtgaaagccggatgcgc

SEQ ID NO: 9781 - DNA, 26 bp, Homo sapiens
cagtgcatgtgaaagccggatgcgcg

SEQ ID NO: 9782 - DNA, 26 bp, Homo sapiens
agtgcatgtgaaagccggatgcgcgg

SEQ ID NO: 9783 - DNA, 26 bp, Homo sapiens
gtgcatgtgaaagccggatgcgcggt

SEQ ID NO: 9784 - DNA, 26 bp, Homo sapiens
tgcatgtgaaagccggatgcgcggtt

SEQ ID NO: 9785 - DNA, 26 bp, Homo sapiens
gcatgtgaaagccggatgcgcggttg

SEQ ID NO: 9786 - DNA, 26 bp, Homo sapiens
catgtgaaagccggatgcgcggttgg

SEQ ID NO: 9787 - DNA, 26 bp, Homo sapiens
atgtgaaagccggatgcgcggttggt

SEQ ID NO: 9788 - DNA, 26 bp, Homo sapiens
tgtgaaagccggatgcgcggttggta

SEQ ID NO: 9789 - DNA, 26 bp, Homo sapiens
gtgaaagccggatgcgcggttggtat

SEQ ID NO: 9790 - DNA, 26 bp, Homo sapiens
tgaaagccggatgcgcggttggtata

SEQ ID NO: 9791 - DNA, 26 bp, Homo sapiens
gaaagccggatgcgcggttggtatag

SEQ ID NO: 9792 - DNA, 26 bp, Homo sapiens
aaagccggatgcgcggttggtatagc

SEQ ID NO: 9793 - DNA, 26 bp, Homo sapiens
aagccggatgcgcggttggtatagct

SEQ ID NO: 9794 - DNA, 26 bp, Homo sapiens
agccggatgcgcggttggtatagcta

SEQ ID NO: 9795 - DNA, 26 bp, Homo sapiens
gccggatgcgcggttggtatagctat

SEQ ID NO: 9796 - DNA, 26 bp, Homo sapiens
ccggatgcgcggttggtatagctatt

SEQ ID NO: 9797 - DNA, 26 bp, Homo sapiens
cggatgcgcggttggtatagctatta

SEQ ID NO: 9798 - DNA, 26 bp, Homo sapiens
ggatgcgcggttggtatagctattac

SEQ ID NO: 9799 - DNA, 26 bp, Homo sapiens
gatgcgcggttggtatagctattaca

SEQ ID NO: 9800 - DNA, 26 bp, Homo sapiens
atgcgcggttggtatagctattacat

SEQ ID NO: 9801 - DNA, 26 bp, Homo sapiens
tgcgcggttggtatagctattacatg

SEQ ID NO: 9802 - DNA, 26 bp, Homo sapiens
gcgcggttggtatagctattacatgc

SEQ ID NO: 9803 - DNA, 26 bp, Homo sapiens
cgcggttggtatagctattacatgca

SEQ ID NO: 9804 - DNA, 26 bp, Homo sapiens
gcggttggtatagctattacatgcat

SEQ ID NO: 9805 - DNA, 26 bp, Homo sapiens
cggttggtatagctattacatgcatt

SEQ ID NO: 9806 - DNA, 26 bp, Homo sapiens
ggttggtatagctattacatgcattc

SEQ ID NO: 9807 - DNA, 26 bp, Homo sapiens
gttggtatagctattacatgcattct

SEQ ID NO: 9808 - DNA, 26 bp, Homo sapiens
ttggtatagctattacatgcattctt

SEQ ID NO: 9809 - DNA, 26 bp, Homo sapiens
tggtatagctattacatgcattctta

SEQ ID NO: 9810 - DNA, 26 bp, Homo sapiens
ggtatagctattacatgcattcttat

SEQ ID NO: 9811 - DNA, 26 bp, Homo sapiens
gtatagctattacatgcattcttatt

SEQ ID NO: 9812 - DNA, 26 bp, Homo sapiens
tatagctattacatgcattcttattc

SEQ ID NO: 9813 - DNA, 26 bp, Homo sapiens
atagctattacatgcattcttattct

SEQ ID NO: 9814 - DNA, 26 bp, Homo sapiens
tagctattacatgcattcttattctc

SEQ ID NO: 9815 - DNA, 26 bp, Homo sapiens
agctattacatgcattcttattctct

SEQ ID NO: 9816 - DNA, 26 bp, Homo sapiens
gctattacatgcattcttattctctc

SEQ ID NO: 9817 - DNA, 26 bp, Homo sapiens
ctattacatgcattcttattctctct

SEQ ID NO: 9818 - DNA, 26 bp, Homo sapiens
tattacatgcattcttattctctctg

SEQ ID NO: 9819 - DNA, 26 bp, Homo sapiens
attacatgcattcttattctctctgg

SEQ ID NO: 9820 - DNA, 26 bp, Homo sapiens
ttacatgcattcttattctctctggg

SEQ ID NO: 9821 - DNA, 26 bp, Homo sapiens
tacatgcattcttattctctctggga

SEQ ID NO: 9822 - DNA, 26 bp, Homo sapiens
acatgcattcttattctctctgggag

SEQ ID NO: 9823 - DNA, 26 bp, Homo sapiens
catgcattcttattctctctgggagt

SEQ ID NO: 9824 - DNA, 26 bp, Homo sapiens
atgcattcttattctctctgggagtt

SEQ ID NO: 9825 - DNA, 26 bp, Homo sapiens
tgcattcttattctctctgggagtta

SEQ ID NO: 9826 - DNA, 26 bp, Homo sapiens
gcattcttattctctctgggagttag

SEQ ID NO: 9827 - DNA, 26 bp, Homo sapiens
cattcttattctctctgggagttaga

SEQ ID NO: 9828 - DNA, 26 bp, Homo sapiens
attcttattctctctgggagttagag

SEQ ID NO: 9829 - DNA, 26 bp, Homo sapiens
ttcttattctctctgggagttagagt

SEQ ID NO: 9830 - DNA, 26 bp, Homo sapiens
tcttattctctctgggagttagagtg

SEQ ID NO: 9831 - DNA, 26 bp, Homo sapiens
cttattctctctgggagttagagtga

SEQ ID NO: 9832 - DNA, 26 bp, Homo sapiens
ttattctctctgggagttagagtgac

SEQ ID NO: 9833 - DNA, 26 bp, Homo sapiens
tattctctctgggagttagagtgact

SEQ ID NO: 9834 - DNA, 26 bp, Homo sapiens
attctctctgggagttagagtgacta

SEQ ID NO: 9835 - DNA, 26 bp, Homo sapiens
ttctctctgggagttagagtgactag

SEQ ID NO: 9836 - DNA, 26 bp, Homo sapiens
tctctctgggagttagagtgactagg

SEQ ID NO: 9837 - DNA, 26 bp, Homo sapiens
ctctctgggagttagagtgactagga

SEQ ID NO: 9838 - DNA, 26 bp, Homo sapiens
tctctgggagttagagtgactaggaa

SEQ ID NO: 9839 - DNA, 26 bp, Homo sapiens
ctctgggagttagagtgactaggaag

SEQ ID NO: 9840 - DNA, 26 bp, Homo sapiens
tctgggagttagagtgactaggaagg

SEQ ID NO: 9841 - DNA, 26 bp, Homo sapiens
ctgggagttagagtgactaggaaggc

SEQ ID NO: 9842 - DNA, 26 bp, Homo sapiens
tgggagttagagtgactaggaaggca

SEQ ID NO: 9843 - DNA, 26 bp, Homo sapiens
gggagttagagtgactaggaaggcac

SEQ ID NO: 9844 - DNA, 26 bp, Homo sapiens
ggagttagagtgactaggaaggcaca

SEQ ID NO: 9845 - DNA, 26 bp, Homo sapiens
gagttagagtgactaggaaggcacag

SEQ ID NO: 9846 - DNA, 26 bp, Homo sapiens
agttagagtgactaggaaggcacagg

SEQ ID NO: 9847 - DNA, 26 bp, Homo sapiens
gttagagtgactaggaaggcacaggc

SEQ ID NO: 9848 - DNA, 26 bp, Homo sapiens
ttagagtgactaggaaggcacaggcc

SEQ ID NO: 9849 - DNA, 26 bp, Homo sapiens
tagagtgactaggaaggcacaggcct

SEQ ID NO: 9850 - DNA, 26 bp, Homo sapiens
agagtgactaggaaggcacaggcctg

SEQ ID NO: 9851 - DNA, 26 bp, Homo sapiens
gagtgactaggaaggcacaggcctgg

SEQ ID NO: 9852 - DNA, 26 bp, Homo sapiens
agtgactaggaaggcacaggcctggc

SEQ ID NO: 9853 - DNA, 26 bp, Homo sapiens
gtgactaggaaggcacaggcctggct

SEQ ID NO: 9854 - DNA, 26 bp, Homo sapiens
tgactaggaaggcacaggcctggcta

SEQ ID NO: 9855 - DNA, 26 bp, Homo sapiens
gactaggaaggcacaggcctggctag

SEQ ID NO: 9856 - DNA, 26 bp, Homo sapiens
actaggaaggcacaggcctggctaga

SEQ ID NO: 9857 - DNA, 26 bp, Homo sapiens
ctaggaaggcacaggcctggctagaa

SEQ ID NO: 9858 - DNA, 26 bp, Homo sapiens
taggaaggcacaggcctggctagaag

SEQ ID NO: 9859 - DNA, 26 bp, Homo sapiens
aggaaggcacaggcctggctagaagt

SEQ ID NO: 9860 - DNA, 26 bp, Homo sapiens
ggaaggcacaggcctggctagaagtg

SEQ ID NO: 9861 - DNA, 26 bp, Homo sapiens
gaaggcacaggcctggctagaagtgg

SEQ ID NO: 9862 - DNA, 26 bp, Homo sapiens
aaggcacaggcctggctagaagtggg

SEQ ID NO: 9863 - DNA, 26 bp, Homo sapiens
aggcacaggcctggctagaagtgggc

SEQ ID NO: 9864 - DNA, 26 bp, Homo sapiens
ggcacaggcctggctagaagtgggcc

SEQ ID NO: 9865 - DNA, 26 bp, Homo sapiens
gcacaggcctggctagaagtgggcct

SEQ ID NO: 9866 - DNA, 26 bp, Homo sapiens
cacaggcctggctagaagtgggcctg

SEQ ID NO: 9867 - DNA, 26 bp, Homo sapiens
acaggcctggctagaagtgggcctgg

SEQ ID NO: 9868 - DNA, 26 bp, Homo sapiens
caggcctggctagaagtgggcctggg

SEQ ID NO: 9869 - DNA, 26 bp, Homo sapiens
aggcctggctagaagtgggcctgggg

SEQ ID NO: 9870 - DNA, 26 bp, Homo sapiens
ggcctggctagaagtgggcctggggt

SEQ ID NO: 9871 - DNA, 26 bp, Homo sapiens
gcctggctagaagtgggcctggggtc

SEQ ID NO: 9872 - DNA, 26 bp, Homo sapiens
cctggctagaagtgggcctggggtct

SEQ ID NO: 9873 - DNA, 26 bp, Homo sapiens
ctggctagaagtgggcctggggtctc

SEQ ID NO: 9874 - DNA, 26 bp, Homo sapiens
tggctagaagtgggcctggggtctct

SEQ ID NO: 9875 - DNA, 26 bp, Homo sapiens
ggctagaagtgggcctggggtctctc

SEQ ID NO: 9876 - DNA, 26 bp, Homo sapiens
gctagaagtgggcctggggtctctcc

SEQ ID NO: 9877 - DNA, 26 bp, Homo sapiens
ctagaagtgggcctggggtctctcca

SEQ ID NO: 9878 - DNA, 26 bp, Homo sapiens
tagaagtgggcctggggtctctccag

SEQ ID NO: 9879 - DNA, 26 bp, Homo sapiens
agaagtgggcctggggtctctccagt

SEQ ID NO: 9880 - DNA, 26 bp, Homo sapiens
gaagtgggcctggggtctctccagtg

SEQ ID NO: 9881 - DNA, 26 bp, Homo sapiens
aagtgggcctggggtctctccagtgg

SEQ ID NO: 9882 - DNA, 26 bp, Homo sapiens
agtgggcctggggtctctccagtggt

SEQ ID NO: 9883 - DNA, 26 bp, Homo sapiens
gtgggcctggggtctctccagtggtg

SEQ ID NO: 9884 - DNA, 26 bp, Homo sapiens
tgggcctggggtctctccagtggtgt

SEQ ID NO: 9885 - DNA, 26 bp, Homo sapiens
gggcctggggtctctccagtggtgtc

SEQ ID NO: 9886 - DNA, 26 bp, Homo sapiens
ggcctggggtctctccagtggtgtca

SEQ ID NO: 9887 - DNA, 26 bp, Homo sapiens
gcctggggtctctccagtggtgtcag

SEQ ID NO: 9888 - DNA, 26 bp, Homo sapiens
cctggggtctctccagtggtgtcagg

SEQ ID NO: 9889 - DNA, 26 bp, Homo sapiens
ctggggtctctccagtggtgtcaggc

SEQ ID NO: 9890 - DNA, 26 bp, Homo sapiens
tggggtctctccagtggtgtcaggcc

SEQ ID NO: 9891 - DNA, 26 bp, Homo sapiens
ggggtctctccagtggtgtcaggcct

SEQ ID NO: 9892 - DNA, 26 bp, Homo sapiens
gggtctctccagtggtgtcaggcctg

SEQ ID NO: 9893 - DNA, 26 bp, Homo sapiens
ggtctctccagtggtgtcaggcctgg

SEQ ID NO: 9894 - DNA, 26 bp, Homo sapiens
gtctctccagtggtgtcaggcctggg

SEQ ID NO: 9895 - DNA, 26 bp, Homo sapiens
tctctccagtggtgtcaggcctgggc

SEQ ID NO: 9896 - DNA, 26 bp, Homo sapiens
ctctccagtggtgtcaggcctgggcc

SEQ ID NO: 9897 - DNA, 26 bp, Homo sapiens
tctccagtggtgtcaggcctgggccc

SEQ ID NO: 9898 - DNA, 26 bp, Homo sapiens
ctccagtggtgtcaggcctgggcccg

SEQ ID NO: 9899 - DNA, 26 bp, Homo sapiens
tccagtggtgtcaggcctgggcccga

SEQ ID NO: 9900 - DNA, 26 bp, Homo sapiens
ccagtggtgtcaggcctgggcccgag

SEQ ID NO: 9901 - DNA, 26 bp, Homo sapiens
cagtggtgtcaggcctgggcccgagt

SEQ ID NO: 9902 - DNA, 26 bp, Homo sapiens
agtggtgtcaggcctgggcccgagtt

SEQ ID NO: 9903 - DNA, 26 bp, Homo sapiens
gtggtgtcaggcctgggcccgagttg

SEQ ID NO: 9904 - DNA, 26 bp, Homo sapiens
tggtgtcaggcctgggcccgagttgt

SEQ ID NO: 9905 - DNA, 26 bp, Homo sapiens
ggtgtcaggcctgggcccgagttgtg

SEQ ID NO: 9906 - DNA, 26 bp, Homo sapiens
gtgtcaggcctgggcccgagttgtgc

SEQ ID NO: 9907 - DNA, 26 bp, Homo sapiens
tgtcaggcctgggcccgagttgtgct

SEQ ID NO: 9908 - DNA, 26 bp, Homo sapiens
gtcaggcctgggcccgagttgtgctg

SEQ ID NO: 9909 - DNA, 26 bp, Homo sapiens
tcaggcctgggcccgagttgtgctgt

SEQ ID NO: 9910 - DNA, 26 bp, Homo sapiens
caggcctgggcccgagttgtgctgtg

SEQ ID NO: 9911 - DNA, 26 bp, Homo sapiens
aggcctgggcccgagttgtgctgtgg

SEQ ID NO: 9912 - DNA, 26 bp, Homo sapiens
ggcctgggcccgagttgtgctgtgga

SEQ ID NO: 9913 - DNA, 26 bp, Homo sapiens
gcctgggcccgagttgtgctgtggag

SEQ ID NO: 9914 - DNA, 26 bp, Homo sapiens
cctgggcccgagttgtgctgtggaga

SEQ ID NO: 9915 - DNA, 26 bp, Homo sapiens
ctgggcccgagttgtgctgtggagac

SEQ ID NO: 9916 - DNA, 26 bp, Homo sapiens
tgggcccgagttgtgctgtggagaca

SEQ ID NO: 9917 - DNA, 26 bp, Homo sapiens
gggcccgagttgtgctgtggagacac

SEQ ID NO: 9918 - DNA, 26 bp, Homo sapiens
ggcccgagttgtgctgtggagacacg

SEQ ID NO: 9919 - DNA, 26 bp, Homo sapiens
gcccgagttgtgctgtggagacacgg

SEQ ID NO: 9920 - DNA, 26 bp, Homo sapiens
cccgagttgtgctgtggagacacgga

SEQ ID NO: 9921 - DNA, 26 bp, Homo sapiens
ccgagttgtgctgtggagacacggag

SEQ ID NO: 9922 - DNA, 26 bp, Homo sapiens
cgagttgtgctgtggagacacggagg

SEQ ID NO: 9923 - DNA, 26 bp, Homo sapiens
gagttgtgctgtggagacacggaggc

SEQ ID NO: 9924 - DNA, 26 bp, Homo sapiens
agttgtgctgtggagacacggaggcg

SEQ ID NO: 9925 - DNA, 26 bp, Homo sapiens
gttgtgctgtggagacacggaggcgg

SEQ ID NO: 9926 - DNA, 26 bp, Homo sapiens
ttgtgctgtggagacacggaggcggg

SEQ ID NO: 9927 - DNA, 26 bp, Homo sapiens
tgtgctgtggagacacggaggcgggc

SEQ ID NO: 9928 - DNA, 26 bp, Homo sapiens
gtgctgtggagacacggaggcgggcc

SEQ ID NO: 9929 - DNA, 26 bp, Homo sapiens
tgctgtggagacacggaggcgggccc

SEQ ID NO: 9930 - DNA, 26 bp, Homo sapiens
gctgtggagacacggaggcgggccct

SEQ ID NO: 9931 - DNA, 26 bp, Homo sapiens
ctgtggagacacggaggcgggccctt

SEQ ID NO: 9932 - DNA, 26 bp, Homo sapiens
tgtggagacacggaggcgggcccttg

SEQ ID NO: 9933 - DNA, 26 bp, Homo sapiens
gtggagacacggaggcgggcccttgg

SEQ ID NO: 9934 - DNA, 26 bp, Homo sapiens
tggagacacggaggcgggcccttggg

SEQ ID NO: 9935 - DNA, 26 bp, Homo sapiens
ggagacacggaggcgggcccttgggg

SEQ ID NO: 9936 - DNA, 26 bp, Homo sapiens
gagacacggaggcgggcccttgggga

SEQ ID NO: 9937 - DNA, 26 bp, Homo sapiens
agacacggaggcgggcccttggggac

SEQ ID NO: 9938 - DNA, 26 bp, Homo sapiens
gacacggaggcgggcccttggggaca

SEQ ID NO: 9939 - DNA, 26 bp, Homo sapiens
acacggaggcgggcccttggggacag

SEQ ID NO: 9940 - DNA, 26 bp, Homo sapiens
cacggaggcgggcccttggggacagg

SEQ ID NO: 9941 - DNA, 26 bp, Homo sapiens
acggaggcgggcccttggggacaggc

SEQ ID NO: 9942 - DNA, 26 bp, Homo sapiens
cggaggcgggcccttggggacaggca

SEQ ID NO: 9943 - DNA, 26 bp, Homo sapiens
ggaggcgggcccttggggacaggcag

SEQ ID NO: 9944 - DNA, 26 bp, Homo sapiens
gaggcgggcccttggggacaggcaga

SEQ ID NO: 9945 - DNA, 26 bp, Homo sapiens
aggcgggcccttggggacaggcagag

SEQ ID NO: 9946 - DNA, 26 bp, Homo sapiens
ggcgggcccttggggacaggcagagg

SEQ ID NO: 9947 - DNA, 26 bp, Homo sapiens
gcgggcccttggggacaggcagaggc

SEQ ID NO: 9948 - DNA, 26 bp, Homo sapiens
cgggcccttggggacaggcagaggca

SEQ ID NO: 9949 - DNA, 26 bp, Homo sapiens
gggcccttggggacaggcagaggcag

SEQ ID NO: 9950 - DNA, 26 bp, Homo sapiens
ggcccttggggacaggcagaggcagt

SEQ ID NO: 9951 - DNA, 26 bp, Homo sapiens
gcccttggggacaggcagaggcagtg

SEQ ID NO: 9952 - DNA, 26 bp, Homo sapiens
cccttggggacaggcagaggcagtgg

SEQ ID NO: 9953 - DNA, 26 bp, Homo sapiens
ccttggggacaggcagaggcagtggg

SEQ ID NO: 9954 - DNA, 26 bp, Homo sapiens
cttggggacaggcagaggcagtgggt

SEQ ID NO: 9955 - DNA, 26 bp, Homo sapiens
ttggggacaggcagaggcagtgggtt

SEQ ID NO: 9956 - DNA, 26 bp, Homo sapiens
tggggacaggcagaggcagtgggtta

SEQ ID NO: 9957 - DNA, 26 bp, Homo sapiens
ggggacaggcagaggcagtgggttag

SEQ ID NO: 9958 - DNA, 26 bp, Homo sapiens
gggacaggcagaggcagtgggttagg

SEQ ID NO: 9959 - DNA, 26 bp, Homo sapiens
ggacaggcagaggcagtgggttaggg

SEQ ID NO: 9960 - DNA, 26 bp, Homo sapiens
gacaggcagaggcagtgggttagggc

SEQ ID NO: 9961 - DNA, 26 bp, Homo sapiens
acaggcagaggcagtgggttagggct

SEQ ID NO: 9962 - DNA, 26 bp, Homo sapiens
caggcagaggcagtgggttagggctc

SEQ ID NO: 9963 - DNA, 26 bp, Homo sapiens
aggcagaggcagtgggttagggctcc

SEQ ID NO: 9964 - DNA, 26 bp, Homo sapiens
ggcagaggcagtgggttagggctcct

SEQ ID NO: 9965 - DNA, 26 bp, Homo sapiens
gcagaggcagtgggttagggctcctg

SEQ ID NO: 9966 - DNA, 26 bp, Homo sapiens
cagaggcagtgggttagggctcctgg

SEQ ID NO: 9967 - DNA, 26 bp, Homo sapiens
agaggcagtgggttagggctcctgga

SEQ ID NO: 9968 - DNA, 26 bp, Homo sapiens
gaggcagtgggttagggctcctggac

SEQ ID NO: 9969 - DNA, 26 bp, Homo sapiens
aggcagtgggttagggctcctggacc

SEQ ID NO: 9970 - DNA, 26 bp, Homo sapiens
ggcagtgggttagggctcctggacca

SEQ ID NO: 9971 - DNA, 26 bp, Homo sapiens
gcagtgggttagggctcctggaccag

SEQ ID NO: 9972 - DNA, 26 bp, Homo sapiens
cagtgggttagggctcctggaccaga

SEQ ID NO: 9973 - DNA, 26 bp, Homo sapiens
agtgggttagggctcctggaccagag

SEQ ID NO: 9974 - DNA, 26 bp, Homo sapiens
gtgggttagggctcctggaccagaga

SEQ ID NO: 9975 - DNA, 26 bp, Homo sapiens
tgggttagggctcctggaccagagag

SEQ ID NO: 9976 - DNA, 26 bp, Homo sapiens
gggttagggctcctggaccagagagg

SEQ ID NO: 9977 - DNA, 26 bp, Homo sapiens
ggttagggctcctggaccagagagga

SEQ ID NO: 9978 - DNA, 26 bp, Homo sapiens
gttagggctcctggaccagagaggag

SEQ ID NO: 9979 - DNA, 26 bp, Homo sapiens
ttagggctcctggaccagagaggagg

SEQ ID NO: 9980 - DNA, 26 bp, Homo sapiens
tagggctcctggaccagagaggagga

SEQ ID NO: 9981 - DNA, 26 bp, Homo sapiens
agggctcctggaccagagaggaggag

SEQ ID NO: 9982 - DNA, 26 bp, Homo sapiens
gggctcctggaccagagaggaggaga

SEQ ID NO: 9983 - DNA, 26 bp, Homo sapiens
ggctcctggaccagagaggaggagat

SEQ ID NO: 9984 - DNA, 26 bp, Homo sapiens
gctcctggaccagagaggaggagatc

SEQ ID NO: 9985 - DNA, 26 bp, Homo sapiens
ctcctggaccagagaggaggagatct

SEQ ID NO: 9986 - DNA, 26 bp, Homo sapiens
tcctggaccagagaggaggagatctt

SEQ ID NO: 9987 - DNA, 26 bp, Homo sapiens
cctggaccagagaggaggagatcttc

SEQ ID NO: 9988 - DNA, 26 bp, Homo sapiens
ctggaccagagaggaggagatcttct

SEQ ID NO: 9989 - DNA, 26 bp, Homo sapiens
tggaccagagaggaggagatcttctt

SEQ ID NO: 9990 - DNA, 26 bp, Homo sapiens
ggaccagagaggaggagatcttcttg

SEQ ID NO: 9991 - DNA, 26 bp, Homo sapiens
gaccagagaggaggagatcttcttga

SEQ ID NO: 9992 - DNA, 26 bp, Homo sapiens
accagagaggaggagatcttcttgaa

SEQ ID NO: 9993 - DNA, 26 bp, Homo sapiens
ccagagaggaggagatcttcttgaag

SEQ ID NO: 9994 - DNA, 26 bp, Homo sapiens
cagagaggaggagatcttcttgaaga

SEQ ID NO: 9995 - DNA, 26 bp, Homo sapiens
agagaggaggagatcttcttgaagaa

SEQ ID NO: 9996 - DNA, 26 bp, Homo sapiens
gagaggaggagatcttcttgaagaag

SEQ ID NO: 9997 - DNA, 26 bp, Homo sapiens
agaggaggagatcttcttgaagaagg

SEQ ID NO: 9998 - DNA, 26 bp, Homo sapiens
gaggaggagatcttcttgaagaaggg

SEQ ID NO: 9999 - DNA, 26 bp, Homo sapiens
aggaggagatcttcttgaagaagggg

SEQ ID NO: 10000 - DNA, 26 bp, Homo sapiens
ggaggagatcttcttgaagaagggga

SEQ ID NO: 10001 - DNA, 26 bp, Homo sapiens
gaggagatcttcttgaagaaggggag

SEQ ID NO: 10002 - DNA, 26 bp, Homo sapiens
aggagatcttcttgaagaaggggagc

SEQ ID NO: 10003 - DNA, 26 bp, Homo sapiens
ggagatcttcttgaagaaggggagcg

SEQ ID NO: 10004 - DNA, 26 bp, Homo sapiens
gagatcttcttgaagaaggggagcgg

SEQ ID NO: 10005 - DNA, 26 bp, Homo sapiens
agatcttcttgaagaaggggagcggg

SEQ ID NO: 10006 - DNA, 26 bp, Homo sapiens
gatcttcttgaagaaggggagcgggt

SEQ ID NO: 10007 - DNA, 26 bp, Homo sapiens
atcttcttgaagaaggggagcgggta

SEQ ID NO: 10008 - DNA, 26 bp, Homo sapiens
tcttcttgaagaaggggagcgggtaa

SEQ ID NO: 10009 - DNA, 26 bp, Homo sapiens
cttcttgaagaaggggagcgggtaaa

SEQ ID NO: 10010 - DNA, 26 bp, Homo sapiens
ttcttgaagaaggggagcgggtaaag

SEQ ID NO: 10011 - DNA, 26 bp, Homo sapiens
tcttgaagaaggggagcgggtaaagg

SEQ ID NO: 10012 - DNA, 26 bp, Homo sapiens
cttgaagaaggggagcgggtaaaggt

SEQ ID NO: 10013 - DNA, 26 bp, Homo sapiens
ttgaagaaggggagcgggtaaaggtc

SEQ ID NO: 10014 - DNA, 26 bp, Homo sapiens
tgaagaaggggagcgggtaaaggtct

SEQ ID NO: 10015 - DNA, 26 bp, Homo sapiens
gaagaaggggagcgggtaaaggtctg

SEQ ID NO: 10016 - DNA, 26 bp, Homo sapiens
aagaaggggagcgggtaaaggtctgg

SEQ ID NO: 10017 - DNA, 26 bp, Homo sapiens
agaaggggagcgggtaaaggtctggg

SEQ ID NO: 10018 - DNA, 26 bp, Homo sapiens
gaaggggagcgggtaaaggtctgggt

SEQ ID NO: 10019 - DNA, 26 bp, Homo sapiens
aaggggagcgggtaaaggtctgggtg

SEQ ID NO: 10020 - DNA, 26 bp, Homo sapiens
aggggagcgggtaaaggtctgggtgg

SEQ ID NO: 10021 - DNA, 26 bp, Homo sapiens
ggggagcgggtaaaggtctgggtggg

SEQ ID NO: 10022 - DNA, 26 bp, Homo sapiens
gggagcgggtaaaggtctgggtgggg

SEQ ID NO: 10023 - DNA, 26 bp, Homo sapiens
ggagcgggtaaaggtctgggtggggc

SEQ ID NO: 10024 - DNA, 26 bp, Homo sapiens
gagcgggtaaaggtctgggtggggcc

SEQ ID NO: 10025 - DNA, 26 bp, Homo sapiens
agcgggtaaaggtctgggtggggcct

SEQ ID NO: 10026 - DNA, 26 bp, Homo sapiens
gcgggtaaaggtctgggtggggcctg

SEQ ID NO: 10027 - DNA, 26 bp, Homo sapiens
cgggtaaaggtctgggtggggcctgg

SEQ ID NO: 10028 - DNA, 26 bp, Homo sapiens
gggtaaaggtctgggtggggcctgga

SEQ ID NO: 10029 - DNA, 26 bp, Homo sapiens
ggtaaaggtctgggtggggcctggag

SEQ ID NO: 10030 - DNA, 26 bp, Homo sapiens
gtaaaggtctgggtggggcctggaga

SEQ ID NO: 10031 - DNA, 26 bp, Homo sapiens
taaaggtctgggtggggcctggagag

SEQ ID NO: 10032 - DNA, 26 bp, Homo sapiens
aaaggtctgggtggggcctggagagc

SEQ ID NO: 10033 - DNA, 26 bp, Homo sapiens
aaggtctgggtggggcctggagagct

SEQ ID NO: 10034 - DNA, 26 bp, Homo sapiens
aggtctgggtggggcctggagagctc

SEQ ID NO: 10035 - DNA, 26 bp, Homo sapiens
ggtctgggtggggcctggagagctct

SEQ ID NO: 10036 - DNA, 26 bp, Homo sapiens
gtctgggtggggcctggagagctctc

SEQ ID NO: 10037 - DNA, 26 bp, Homo sapiens
tctgggtggggcctggagagctctcg

SEQ ID NO: 10038 - DNA, 26 bp, Homo sapiens
ctgggtggggcctggagagctctcgg

SEQ ID NO: 10039 - DNA, 26 bp, Homo sapiens
tgggtggggcctggagagctctcggg

SEQ ID NO: 10040 - DNA, 26 bp, Homo sapiens
gggtggggcctggagagctctcgggt

SEQ ID NO: 10041 - DNA, 26 bp, Homo sapiens
ggtggggcctggagagctctcgggtt

SEQ ID NO: 10042 - DNA, 26 bp, Homo sapiens
gtggggcctggagagctctcgggtta

SEQ ID NO: 10043 - DNA, 26 bp, Homo sapiens
tggggcctggagagctctcgggttac

SEQ ID NO: 10044 - DNA, 26 bp, Homo sapiens
ggggcctggagagctctcgggttact

SEQ ID NO: 10045 - DNA, 26 bp, Homo sapiens
gggcctggagagctctcgggttactt

SEQ ID NO: 10046 - DNA, 26 bp, Homo sapiens
ggcctggagagctctcgggttacttc

SEQ ID NO: 10047 - DNA, 26 bp, Homo sapiens
gcctggagagctctcgggttacttca

SEQ ID NO: 10048 - DNA, 26 bp, Homo sapiens
cctggagagctctcgggttacttcaa

SEQ ID NO: 10049 - DNA, 26 bp, Homo sapiens
ctggagagctctcgggttacttcaaa

SEQ ID NO: 10050 - DNA, 26 bp, Homo sapiens
tggagagctctcgggttacttcaaag

SEQ ID NO: 10051 - DNA, 26 bp, Homo sapiens
ggagagctctcgggttacttcaaagc

SEQ ID NO: 10052 - DNA, 26 bp, Homo sapiens
gagagctctcgggttacttcaaagct

SEQ ID NO: 10053 - DNA, 26 bp, Homo sapiens
agagctctcgggttacttcaaagctc

SEQ ID NO: 10054 - DNA, 26 bp, Homo sapiens
gagctctcgggttacttcaaagctcc

SEQ ID NO: 10055 - DNA, 26 bp, Homo sapiens
agctctcgggttacttcaaagctcct

SEQ ID NO: 10056 - DNA, 26 bp, Homo sapiens
gctctcgggttacttcaaagctcctt

SEQ ID NO: 10057 - DNA, 26 bp, Homo sapiens
ctctcgggttacttcaaagctccttc

SEQ ID NO: 10058 - DNA, 26 bp, Homo sapiens
tctcgggttacttcaaagctccttct

SEQ ID NO: 10059 - DNA, 26 bp, Homo sapiens
ctcgggttacttcaaagctccttctc

SEQ ID NO: 10060 - DNA, 26 bp, Homo sapiens
tcgggttacttcaaagctccttctcc

SEQ ID NO: 10061 - DNA, 26 bp, Homo sapiens
cgggttacttcaaagctccttctcct

SEQ ID NO: 10062 - DNA, 26 bp, Homo sapiens
gggttacttcaaagctccttctcctg

SEQ ID NO: 10063 - DNA, 26 bp, Homo sapiens
ggttacttcaaagctccttctcctgc

SEQ ID NO: 10064 - DNA, 26 bp, Homo sapiens
gttacttcaaagctccttctcctgct

SEQ ID NO: 10065 - DNA, 26 bp, Homo sapiens
ttacttcaaagctccttctcctgctc

SEQ ID NO: 10066 - DNA, 26 bp, Homo sapiens
tacttcaaagctccttctcctgctca

SEQ ID NO: 10067 - DNA, 26 bp, Homo sapiens
acttcaaagctccttctcctgctcag

SEQ ID NO: 10068 - DNA, 26 bp, Homo sapiens
cttcaaagctccttctcctgctcaga

SEQ ID NO: 10069 - DNA, 26 bp, Homo sapiens
ttcaaagctccttctcctgctcagat

SEQ ID NO: 10070 - DNA, 26 bp, Homo sapiens
tcaaagctccttctcctgctcagatg

SEQ ID NO: 10071 - DNA, 26 bp, Homo sapiens
caaagctccttctcctgctcagatgg

SEQ ID NO: 10072 - DNA, 26 bp, Homo sapiens
aaagctccttctcctgctcagatgga

SEQ ID NO: 10073 - DNA, 26 bp, Homo sapiens
aagctccttctcctgctcagatggag

SEQ ID NO: 10074 - DNA, 26 bp, Homo sapiens
agctccttctcctgctcagatggagt

SEQ ID NO: 10075 - DNA, 26 bp, Homo sapiens
gctccttctcctgctcagatggagtt

SEQ ID NO: 10076 - DNA, 26 bp, Homo sapiens
ctccttctcctgctcagatggagttg

SEQ ID NO: 10077 - DNA, 26 bp, Homo sapiens
tccttctcctgctcagatggagttgg

SEQ ID NO: 10078 - DNA, 26 bp, Homo sapiens
ccttctcctgctcagatggagttggg

SEQ ID NO: 10079 - DNA, 26 bp, Homo sapiens
cttctcctgctcagatggagttgggg

SEQ ID NO: 10080 - DNA, 26 bp, Homo sapiens
ttctcctgctcagatggagttggggg

SEQ ID NO: 10081 - DNA, 26 bp, Homo sapiens
tctcctgctcagatggagttgggggt

SEQ ID NO: 10082 - DNA, 26 bp, Homo sapiens
ctcctgctcagatggagttgggggtc

SEQ ID NO: 10083 - DNA, 26 bp, Homo sapiens
tcctgctcagatggagttgggggtct

SEQ ID NO: 10084 - DNA, 26 bp, Homo sapiens
cctgctcagatggagttgggggtctt

SEQ ID NO: 10085 - DNA, 26 bp, Homo sapiens
ctgctcagatggagttgggggtcttc

SEQ ID NO: 10086 - DNA, 26 bp, Homo sapiens
tgctcagatggagttgggggtcttcc

SEQ ID NO: 10087 - DNA, 26 bp, Homo sapiens
gctcagatggagttgggggtcttcct

SEQ ID NO: 10088 - DNA, 26 bp, Homo sapiens
ctcagatggagttgggggtcttcctc

SEQ ID NO: 10089 - DNA, 26 bp, Homo sapiens
tcagatggagttgggggtcttcctct

SEQ ID NO: 10090 - DNA, 26 bp, Homo sapiens
cagatggagttgggggtcttcctctt

SEQ ID NO: 10091 - DNA, 26 bp, Homo sapiens
agatggagttgggggtcttcctctta

SEQ ID NO: 10092 - DNA, 26 bp, Homo sapiens
gatggagttgggggtcttcctcttag

SEQ ID NO: 10093 - DNA, 26 bp, Homo sapiens
atggagttgggggtcttcctcttagt

SEQ ID NO: 10094 - DNA, 26 bp, Homo sapiens
tggagttgggggtcttcctcttagtg

SEQ ID NO: 10095 - DNA, 26 bp, Homo sapiens
ggagttgggggtcttcctcttagtgg

SEQ ID NO: 10096 - DNA, 26 bp, Homo sapiens
gagttgggggtcttcctcttagtggt

SEQ ID NO: 10097 - DNA, 26 bp, Homo sapiens
agttgggggtcttcctcttagtggtc

SEQ ID NO: 10098 - DNA, 26 bp, Homo sapiens
gttgggggtcttcctcttagtggtcg

SEQ ID NO: 10099 - DNA, 26 bp, Homo sapiens
ttgggggtcttcctcttagtggtcgt

SEQ ID NO: 10100 - DNA, 26 bp, Homo sapiens
tgggggtcttcctcttagtggtcgtc

SEQ ID NO: 10101 - DNA, 26 bp, Homo sapiens
gggggtcttcctcttagtggtcgtca

SEQ ID NO: 10102 - DNA, 26 bp, Homo sapiens
ggggtcttcctcttagtggtcgtcac

SEQ ID NO: 10103 - DNA, 26 bp, Homo sapiens
gggtcttcctcttagtggtcgtcacc

SEQ ID NO: 10104 - DNA, 26 bp, Homo sapiens
ggtcttcctcttagtggtcgtcaccc

SEQ ID NO: 10105 - DNA, 26 bp, Homo sapiens
gtcttcctcttagtggtcgtcaccct

SEQ ID NO: 10106 - DNA, 26 bp, Homo sapiens
tcttcctcttagtggtcgtcaccctg

SEQ ID NO: 10107 - DNA, 26 bp, Homo sapiens
cttcctcttagtggtcgtcaccctgc

SEQ ID NO: 10108 - DNA, 26 bp, Homo sapiens
ttcctcttagtggtcgtcaccctgca

SEQ ID NO: 10109 - DNA, 26 bp, Homo sapiens
tcctcttagtggtcgtcaccctgcaa

SEQ ID NO: 10110 - DNA, 26 bp, Homo sapiens
cctcttagtggtcgtcaccctgcaag

SEQ ID NO: 10111 - DNA, 26 bp, Homo sapiens
ctcttagtggtcgtcaccctgcaagg

SEQ ID NO: 10112 - DNA, 26 bp, Homo sapiens
tcttagtggtcgtcaccctgcaaggc

SEQ ID NO: 10113 - DNA, 26 bp, Homo sapiens
cttagtggtcgtcaccctgcaaggcc

SEQ ID NO: 10114 - DNA, 26 bp, Homo sapiens
ttagtggtcgtcaccctgcaaggcca

SEQ ID NO: 10115 - DNA, 26 bp, Homo sapiens
tagtggtcgtcaccctgcaaggccag

SEQ ID NO: 10116 - DNA, 26 bp, Homo sapiens
agtggtcgtcaccctgcaaggccagt

SEQ ID NO: 10117 - DNA, 26 bp, Homo sapiens
gtggtcgtcaccctgcaaggccagtc

SEQ ID NO: 10118 - DNA, 26 bp, Homo sapiens
tggtcgtcaccctgcaaggccagtcc

SEQ ID NO: 10119 - DNA, 26 bp, Homo sapiens
ggtcgtcaccctgcaaggccagtcca

SEQ ID NO: 10120 - DNA, 26 bp, Homo sapiens
gtcgtcaccctgcaaggccagtccac

SEQ ID NO: 10121 - DNA, 26 bp, Homo sapiens
tcgtcaccctgcaaggccagtccact

SEQ ID NO: 10122 - DNA, 26 bp, Homo sapiens
cgtcaccctgcaaggccagtccactg

SEQ ID NO: 10123 - DNA, 26 bp, Homo sapiens
gtcaccctgcaaggccagtccactgg

SEQ ID NO: 10124 - DNA, 26 bp, Homo sapiens
tcaccctgcaaggccagtccactggc

SEQ ID NO: 10125 - DNA, 26 bp, Homo sapiens
caccctgcaaggccagtccactggca

SEQ ID NO: 10126 - DNA, 26 bp, Homo sapiens
accctgcaaggccagtccactggcat

SEQ ID NO: 10127 - DNA, 26 bp, Homo sapiens
ccctgcaaggccagtccactggcatc

SEQ ID NO: 10128 - DNA, 26 bp, Homo sapiens
cctgcaaggccagtccactggcatct

SEQ ID NO: 10129 - DNA, 26 bp, Homo sapiens
ctgcaaggccagtccactggcatctg

SEQ ID NO: 10130 - DNA, 26 bp, Homo sapiens
tgcaaggccagtccactggcatctgc

SEQ ID NO: 10131 - DNA, 26 bp, Homo sapiens
gcaaggccagtccactggcatctgct

SEQ ID NO: 10132 - DNA, 26 bp, Homo sapiens
caaggccagtccactggcatctgctg

SEQ ID NO: 10133 - DNA, 26 bp, Homo sapiens
aaggccagtccactggcatctgctgc

SEQ ID NO: 10134 - DNA, 26 bp, Homo sapiens
aggccagtccactggcatctgctgca

SEQ ID NO: 10135 - DNA, 26 bp, Homo sapiens
ggccagtccactggcatctgctgcag

SEQ ID NO: 10136 - DNA, 26 bp, Homo sapiens
gccagtccactggcatctgctgcaga

SEQ ID NO: 10137 - DNA, 26 bp, Homo sapiens
ccagtccactggcatctgctgcagag

SEQ ID NO: 10138 - DNA, 26 bp, Homo sapiens
cagtccactggcatctgctgcagagg

SEQ ID NO: 10139 - DNA, 26 bp, Homo sapiens
agtccactggcatctgctgcagaggc

SEQ ID NO: 10140 - DNA, 26 bp, Homo sapiens
gtccactggcatctgctgcagaggcc

SEQ ID NO: 10141 - DNA, 26 bp, Homo sapiens
tccactggcatctgctgcagaggccc

SEQ ID NO: 10142 - DNA, 26 bp, Homo sapiens
ccactggcatctgctgcagaggccca

SEQ ID NO: 10143 - DNA, 26 bp, Homo sapiens
cactggcatctgctgcagaggcccag

SEQ ID NO: 10144 - DNA, 26 bp, Homo sapiens
actggcatctgctgcagaggcccagg

SEQ ID NO: 10145 - DNA, 26 bp, Homo sapiens
ctggcatctgctgcagaggcccagga

SEQ ID NO: 10146 - DNA, 26 bp, Homo sapiens
tggcatctgctgcagaggcccaggag

SEQ ID NO: 10147 - DNA, 26 bp, Homo sapiens
ggcatctgctgcagaggcccaggagc

SEQ ID NO: 10148 - DNA, 26 bp, Homo sapiens
gcatctgctgcagaggcccaggagcg

SEQ ID NO: 10149 - DNA, 26 bp, Homo sapiens
catctgctgcagaggcccaggagcgg

SEQ ID NO: 10150 - DNA, 26 bp, Homo sapiens
atctgctgcagaggcccaggagcggc

SEQ ID NO: 10151 - DNA, 26 bp, Homo sapiens
tctgctgcagaggcccaggagcggct

SEQ ID NO: 10152 - DNA, 26 bp, Homo sapiens
ctgctgcagaggcccaggagcggctg

SEQ ID NO: 10153 - DNA, 26 bp, Homo sapiens
tgctgcagaggcccaggagcggctga

SEQ ID NO: 10154 - DNA, 26 bp, Homo sapiens
gctgcagaggcccaggagcggctgag

SEQ ID NO: 10155 - DNA, 26 bp, Homo sapiens
ctgcagaggcccaggagcggctgagt

SEQ ID NO: 10156 - DNA, 26 bp, Homo sapiens
tgcagaggcccaggagcggctgagtg

SEQ ID NO: 10157 - DNA, 26 bp, Homo sapiens
gcagaggcccaggagcggctgagtgg

SEQ ID NO: 10158 - DNA, 26 bp, Homo sapiens
cagaggcccaggagcggctgagtggc

SEQ ID NO: 10159 - DNA, 26 bp, Homo sapiens
agaggcccaggagcggctgagtggct

SEQ ID NO: 10160 - DNA, 26 bp, Homo sapiens
gaggcccaggagcggctgagtggctc

SEQ ID NO: 10161 - DNA, 26 bp, Homo sapiens
aggcccaggagcggctgagtggctct

SEQ ID NO: 10162 - DNA, 26 bp, Homo sapiens
ggcccaggagcggctgagtggctctg

SEQ ID NO: 10163 - DNA, 26 bp, Homo sapiens
gcccaggagcggctgagtggctctgc

SEQ ID NO: 10164 - DNA, 26 bp, Homo sapiens
cccaggagcggctgagtggctctgca

SEQ ID NO: 10165 - DNA, 26 bp, Homo sapiens
ccaggagcggctgagtggctctgcac

SEQ ID NO: 10166 - DNA, 26 bp, Homo sapiens
caggagcggctgagtggctctgcact

SEQ ID NO: 10167 - DNA, 26 bp, Homo sapiens
aggagcggctgagtggctctgcactc

SEQ ID NO: 10168 - DNA, 26 bp, Homo sapiens
ggagcggctgagtggctctgcactca

SEQ ID NO: 10169 - DNA, 26 bp, Homo sapiens
gagcggctgagtggctctgcactcat

SEQ ID NO: 10170 - DNA, 26 bp, Homo sapiens
agcggctgagtggctctgcactcatg

SEQ ID NO: 10171 - DNA, 26 bp, Homo sapiens
gcggctgagtggctctgcactcatgt

SEQ ID NO: 10172 - DNA, 26 bp, Homo sapiens
cggctgagtggctctgcactcatgtc

SEQ ID NO: 10173 - DNA, 26 bp, Homo sapiens
ggctgagtggctctgcactcatgtct

SEQ ID NO: 10174 - DNA, 26 bp, Homo sapiens
gctgagtggctctgcactcatgtctc

SEQ ID NO: 10175 - DNA, 26 bp, Homo sapiens
ctgagtggctctgcactcatgtctcc

SEQ ID NO: 10176 - DNA, 26 bp, Homo sapiens
tgagtggctctgcactcatgtctcca

SEQ ID NO: 10177 - DNA, 26 bp, Homo sapiens
gagtggctctgcactcatgtctccaa

SEQ ID NO: 10178 - DNA, 26 bp, Homo sapiens
agtggctctgcactcatgtctccaag

SEQ ID NO: 10179 - DNA, 26 bp, Homo sapiens
gtggctctgcactcatgtctccaagt

SEQ ID NO: 10180 - DNA, 26 bp, Homo sapiens
tggctctgcactcatgtctccaagtg

SEQ ID NO: 10181 - DNA, 26 bp, Homo sapiens
ggctctgcactcatgtctccaagtgt

SEQ ID NO: 10182 - DNA, 26 bp, Homo sapiens
gctctgcactcatgtctccaagtgtg

SEQ ID NO: 10183 - DNA, 26 bp, Homo sapiens
ctctgcactcatgtctccaagtgtgt

SEQ ID NO: 10184 - DNA, 26 bp, Homo sapiens
tctgcactcatgtctccaagtgtgtc

SEQ ID NO: 10185 - DNA, 26 bp, Homo sapiens
ctgcactcatgtctccaagtgtgtca

SEQ ID NO: 10186 - DNA, 26 bp, Homo sapiens
tgcactcatgtctccaagtgtgtcac

SEQ ID NO: 10187 - DNA, 26 bp, Homo sapiens
gcactcatgtctccaagtgtgtcacg

SEQ ID NO: 10188 - DNA, 26 bp, Homo sapiens
cactcatgtctccaagtgtgtcacgt

SEQ ID NO: 10189 - DNA, 26 bp, Homo sapiens
actcatgtctccaagtgtgtcacgtc

SEQ ID NO: 10190 - DNA, 26 bp, Homo sapiens
ctcatgtctccaagtgtgtcacgtca

SEQ ID NO: 10191 - DNA, 26 bp, Homo sapiens
tcatgtctccaagtgtgtcacgtcat

SEQ ID NO: 10192 - DNA, 26 bp, Homo sapiens
catgtctccaagtgtgtcacgtcatt

SEQ ID NO: 10193 - DNA, 26 bp, Homo sapiens
atgtctccaagtgtgtcacgtcattg

SEQ ID NO: 10194 - DNA, 26 bp, Homo sapiens
tgtctccaagtgtgtcacgtcattgc

SEQ ID NO: 10195 - DNA, 26 bp, Homo sapiens
gtctccaagtgtgtcacgtcattgca

SEQ ID NO: 10196 - DNA, 26 bp, Homo sapiens
tctccaagtgtgtcacgtcattgcat

SEQ ID NO: 10197 - DNA, 26 bp, Homo sapiens
ctccaagtgtgtcacgtcattgcatg

SEQ ID NO: 10198 - DNA, 26 bp, Homo sapiens
tccaagtgtgtcacgtcattgcatgt

SEQ ID NO: 10199 - DNA, 26 bp, Homo sapiens
ccaagtgtgtcacgtcattgcatgtt

SEQ ID NO: 10200 - DNA, 26 bp, Homo sapiens
caagtgtgtcacgtcattgcatgttt

SEQ ID NO: 10201 - DNA, 26 bp, Homo sapiens
aagtgtgtcacgtcattgcatgttta

SEQ ID NO: 10202 - DNA, 26 bp, Homo sapiens
agtgtgtcacgtcattgcatgtttaa

SEQ ID NO: 10203 - DNA, 26 bp, Homo sapiens
gtgtgtcacgtcattgcatgtttaag

SEQ ID NO: 10204 - DNA, 26 bp, Homo sapiens
tgtgtcacgtcattgcatgtttaagt

SEQ ID NO: 10205 - DNA, 26 bp, Homo sapiens
gtgtcacgtcattgcatgtttaagtg

SEQ ID NO: 10206 - DNA, 26 bp, Homo sapiens
tgtcacgtcattgcatgtttaagtgt

SEQ ID NO: 10207 - DNA, 26 bp, Homo sapiens
gtcacgtcattgcatgtttaagtgtg

SEQ ID NO: 10208 - DNA, 26 bp, Homo sapiens
tcacgtcattgcatgtttaagtgtga

SEQ ID NO: 10209 - DNA, 26 bp, Homo sapiens
cacgtcattgcatgtttaagtgtgag

SEQ ID NO: 10210 - DNA, 26 bp, Homo sapiens
acgtcattgcatgtttaagtgtgaga

SEQ ID NO: 10211 - DNA, 26 bp, Homo sapiens
cgtcattgcatgtttaagtgtgagag

SEQ ID NO: 10212 - DNA, 26 bp, Homo sapiens
gtcattgcatgtttaagtgtgagagg

SEQ ID NO: 10213 - DNA, 26 bp, Homo sapiens
tcattgcatgtttaagtgtgagaggc

SEQ ID NO: 10214 - DNA, 26 bp, Homo sapiens
cattgcatgtttaagtgtgagaggct

SEQ ID NO: 10215 - DNA, 26 bp, Homo sapiens
attgcatgtttaagtgtgagaggctt

SEQ ID NO: 10216 - DNA, 26 bp, Homo sapiens
ttgcatgtttaagtgtgagaggcttt

SEQ ID NO: 10217 - DNA, 26 bp, Homo sapiens
tgcatgtttaagtgtgagaggctttc

SEQ ID NO: 10218 - DNA, 26 bp, Homo sapiens
gcatgtttaagtgtgagaggctttct

SEQ ID NO: 10219 - DNA, 26 bp, Homo sapiens
catgtttaagtgtgagaggctttctt

SEQ ID NO: 10220 - DNA, 26 bp, Homo sapiens
atgtttaagtgtgagaggctttcttc

SEQ ID NO: 10221 - DNA, 26 bp, Homo sapiens
tgtttaagtgtgagaggctttcttcc

SEQ ID NO: 10222 - DNA, 26 bp, Homo sapiens
gtttaagtgtgagaggctttcttcct

SEQ ID NO: 10223 - DNA, 26 bp, Homo sapiens
tttaagtgtgagaggctttcttcctg

SEQ ID NO: 10224 - DNA, 26 bp, Homo sapiens
ttaagtgtgagaggctttcttcctgt

SEQ ID NO: 10225 - DNA, 26 bp, Homo sapiens
taagtgtgagaggctttcttcctgtc

SEQ ID NO: 10226 - DNA, 26 bp, Homo sapiens
aagtgtgagaggctttcttcctgtct

SEQ ID NO: 10227 - DNA, 26 bp, Homo sapiens
agtgtgagaggctttcttcctgtctg

SEQ ID NO: 10228 - DNA, 26 bp, Homo sapiens
gtgtgagaggctttcttcctgtctgg

SEQ ID NO: 10229 - DNA, 26 bp, Homo sapiens
tgtgagaggctttcttcctgtctgga

SEQ ID NO: 10230 - DNA, 26 bp, Homo sapiens
gtgagaggctttcttcctgtctggag

SEQ ID NO: 10231 - DNA, 26 bp, Homo sapiens
tgagaggctttcttcctgtctggaga

SEQ ID NO: 10232 - DNA, 26 bp, Homo sapiens
gagaggctttcttcctgtctggagaa

SEQ ID NO: 10233 - DNA, 26 bp, Homo sapiens
agaggctttcttcctgtctggagaaa

SEQ ID NO: 10234 - DNA, 26 bp, Homo sapiens
gaggctttcttcctgtctggagaaac

SEQ ID NO: 10235 - DNA, 26 bp, Homo sapiens
aggctttcttcctgtctggagaaact

SEQ ID NO: 10236 - DNA, 26 bp, Homo sapiens
ggctttcttcctgtctggagaaacta

SEQ ID NO: 10237 - DNA, 26 bp, Homo sapiens
gctttcttcctgtctggagaaactaa

SEQ ID NO: 10238 - DNA, 26 bp, Homo sapiens
ctttcttcctgtctggagaaactaaa

SEQ ID NO: 10239 - DNA, 26 bp, Homo sapiens
tttcttcctgtctggagaaactaaaa

SEQ ID NO: 10240 - DNA, 26 bp, Homo sapiens
ttcttcctgtctggagaaactaaaag

SEQ ID NO: 10241 - DNA, 26 bp, Homo sapiens
tcttcctgtctggagaaactaaaagg

SEQ ID NO: 10242 - DNA, 26 bp, Homo sapiens
cttcctgtctggagaaactaaaaggc

SEQ ID NO: 10243 - DNA, 26 bp, Homo sapiens
ttcctgtctggagaaactaaaaggct

SEQ ID NO: 10244 - DNA, 26 bp, Homo sapiens
tcctgtctggagaaactaaaaggcta

SEQ ID NO: 10245 - DNA, 26 bp, Homo sapiens
cctgtctggagaaactaaaaggctat

SEQ ID NO: 10246 - DNA, 26 bp, Homo sapiens
ctgtctggagaaactaaaaggctatg

SEQ ID NO: 10247 - DNA, 26 bp, Homo sapiens
tgtctggagaaactaaaaggctatgt

SEQ ID NO: 10248 - DNA, 26 bp, Homo sapiens
gtctggagaaactaaaaggctatgtt

SEQ ID NO: 10249 - DNA, 26 bp, Homo sapiens
tctggagaaactaaaaggctatgttt

SEQ ID NO: 10250 - DNA, 26 bp, Homo sapiens
ctggagaaactaaaaggctatgtttg

SEQ ID NO: 10251 - DNA, 26 bp, Homo sapiens
tggagaaactaaaaggctatgtttgt

SEQ ID NO: 10252 - DNA, 26 bp, Homo sapiens
ggagaaactaaaaggctatgtttgtg

SEQ ID NO: 10253 - DNA, 26 bp, Homo sapiens
gagaaactaaaaggctatgtttgtgc

SEQ ID NO: 10254 - DNA, 26 bp, Homo sapiens
agaaactaaaaggctatgtttgtgcg

SEQ ID NO: 10255 - DNA, 26 bp, Homo sapiens
gaaactaaaaggctatgtttgtgcga

SEQ ID NO: 10256 - DNA, 26 bp, Homo sapiens
aaactaaaaggctatgtttgtgcgat

SEQ ID NO: 10257 - DNA, 26 bp, Homo sapiens
aactaaaaggctatgtttgtgcgatc

SEQ ID NO: 10258 - DNA, 26 bp, Homo sapiens
actaaaaggctatgtttgtgcgatcg

SEQ ID NO: 10259 - DNA, 26 bp, Homo sapiens
ctaaaaggctatgtttgtgcgatcgt

SEQ ID NO: 10260 - DNA, 26 bp, Homo sapiens
taaaaggctatgtttgtgcgatcgtc

SEQ ID NO: 10261 - DNA, 26 bp, Homo sapiens
aaaaggctatgtttgtgcgatcgtcc

SEQ ID NO: 10262 - DNA, 26 bp, Homo sapiens
aaaggctatgtttgtgcgatcgtcca

SEQ ID NO: 10263 - DNA, 26 bp, Homo sapiens
aaggctatgtttgtgcgatcgtccac

SEQ ID NO: 10264 - DNA, 26 bp, Homo sapiens
aggctatgtttgtgcgatcgtccacg

SEQ ID NO: 10265 - DNA, 26 bp, Homo sapiens
ggctatgtttgtgcgatcgtccacga

SEQ ID NO: 10266 - DNA, 26 bp, Homo sapiens
gctatgtttgtgcgatcgtccacgaa

SEQ ID NO: 10267 - DNA, 26 bp, Homo sapiens
ctatgtttgtgcgatcgtccacgaag

SEQ ID NO: 10268 - DNA, 26 bp, Homo sapiens
tatgtttgtgcgatcgtccacgaagc

SEQ ID NO: 10269 - DNA, 26 bp, Homo sapiens
atgtttgtgcgatcgtccacgaagca

SEQ ID NO: 10270 - DNA, 26 bp, Homo sapiens
tgtttgtgcgatcgtccacgaagcac

SEQ ID NO: 10271 - DNA, 26 bp, Homo sapiens
gtttgtgcgatcgtccacgaagcact

SEQ ID NO: 10272 - DNA, 26 bp, Homo sapiens
tttgtgcgatcgtccacgaagcactg

SEQ ID NO: 10273 - DNA, 26 bp, Homo sapiens
ttgtgcgatcgtccacgaagcactgt

SEQ ID NO: 10274 - DNA, 26 bp, Homo sapiens
tgtgcgatcgtccacgaagcactgtc

SEQ ID NO: 10275 - DNA, 26 bp, Homo sapiens
gtgcgatcgtccacgaagcactgtct

SEQ ID NO: 10276 - DNA, 26 bp, Homo sapiens
tgcgatcgtccacgaagcactgtctg

SEQ ID NO: 10277 - DNA, 26 bp, Homo sapiens
gcgatcgtccacgaagcactgtctgg

SEQ ID NO: 10278 - DNA, 26 bp, Homo sapiens
cgatcgtccacgaagcactgtctggg

SEQ ID NO: 10279 - DNA, 26 bp, Homo sapiens
gatcgtccacgaagcactgtctggga

SEQ ID NO: 10280 - DNA, 26 bp, Homo sapiens
atcgtccacgaagcactgtctgggag

SEQ ID NO: 10281 - DNA, 26 bp, Homo sapiens
tcgtccacgaagcactgtctgggagt

SEQ ID NO: 10282 - DNA, 26 bp, Homo sapiens
cgtccacgaagcactgtctgggagtt

SEQ ID NO: 10283 - DNA, 26 bp, Homo sapiens
gtccacgaagcactgtctgggagttt

SEQ ID NO: 10284 - DNA, 26 bp, Homo sapiens
tccacgaagcactgtctgggagtttt

SEQ ID NO: 10285 - DNA, 26 bp, Homo sapiens
ccacgaagcactgtctgggagttttg

SEQ ID NO: 10286 - DNA, 26 bp, Homo sapiens
cacgaagcactgtctgggagttttgg

SEQ ID NO: 10287 - DNA, 26 bp, Homo sapiens
acgaagcactgtctgggagttttggg

SEQ ID NO: 10288 - DNA, 26 bp, Homo sapiens
cgaagcactgtctgggagttttgggg

SEQ ID NO: 10289 - DNA, 26 bp, Homo sapiens
gaagcactgtctgggagttttgggga

SEQ ID NO: 10290 - DNA, 26 bp, Homo sapiens
aagcactgtctgggagttttggggag

SEQ ID NO: 10291 - DNA, 26 bp, Homo sapiens
agcactgtctgggagttttggggagg

SEQ ID NO: 10292 - DNA, 26 bp, Homo sapiens
gcactgtctgggagttttggggagga

SEQ ID NO: 10293 - DNA, 26 bp, Homo sapiens
cactgtctgggagttttggggaggat

SEQ ID NO: 10294 - DNA, 26 bp, Homo sapiens
actgtctgggagttttggggaggata

SEQ ID NO: 10295 - DNA, 26 bp, Homo sapiens
ctgtctgggagttttggggaggatac

SEQ ID NO: 10296 - DNA, 26 bp, Homo sapiens
tgtctgggagttttggggaggataca

SEQ ID NO: 10297 - DNA, 26 bp, Homo sapiens
gtctgggagttttggggaggatacag

SEQ ID NO: 10298 - DNA, 26 bp, Homo sapiens
tctgggagttttggggaggatacaga

SEQ ID NO: 10299 - DNA, 26 bp, Homo sapiens
ctgggagttttggggaggatacagaa

SEQ ID NO: 10300 - DNA, 26 bp, Homo sapiens
tgggagttttggggaggatacagaaa

SEQ ID NO: 10301 - DNA, 26 bp, Homo sapiens
gggagttttggggaggatacagaaac

SEQ ID NO: 10302 - DNA, 26 bp, Homo sapiens
ggagttttggggaggatacagaaacc

SEQ ID NO: 10303 - DNA, 26 bp, Homo sapiens
gagttttggggaggatacagaaacct

SEQ ID NO: 10304 - DNA, 26 bp, Homo sapiens
agttttggggaggatacagaaacctg

SEQ ID NO: 10305 - DNA, 26 bp, Homo sapiens
gttttggggaggatacagaaacctgt

SEQ ID NO: 10306 - DNA, 26 bp, Homo sapiens
ttttggggaggatacagaaacctgtg

SEQ ID NO: 10307 - DNA, 26 bp, Homo sapiens
tttggggaggatacagaaacctgtgc

SEQ ID NO: 10308 - DNA, 26 bp, Homo sapiens
ttggggaggatacagaaacctgtgct

SEQ ID NO: 10309 - DNA, 26 bp, Homo sapiens
tggggaggatacagaaacctgtgctg

SEQ ID NO: 10310 - DNA, 26 bp, Homo sapiens
ggggaggatacagaaacctgtgctga

SEQ ID NO: 10311 - DNA, 26 bp, Homo sapiens
gggaggatacagaaacctgtgctgac

SEQ ID NO: 10312 - DNA, 26 bp, Homo sapiens
ggaggatacagaaacctgtgctgact

SEQ ID NO: 10313 - DNA, 26 bp, Homo sapiens
gaggatacagaaacctgtgctgacta

SEQ ID NO: 10314 - DNA, 26 bp, Homo sapiens
aggatacagaaacctgtgctgactat

SEQ ID NO: 10315 - DNA, 26 bp, Homo sapiens
ggatacagaaacctgtgctgactatg

SEQ ID NO: 10316 - DNA, 26 bp, Homo sapiens
gatacagaaacctgtgctgactatga

SEQ ID NO: 10317 - DNA, 26 bp, Homo sapiens
atacagaaacctgtgctgactatgag

SEQ ID NO: 10318 - DNA, 26 bp, Homo sapiens
tacagaaacctgtgctgactatgagt

SEQ ID NO: 10319 - DNA, 26 bp, Homo sapiens
acagaaacctgtgctgactatgagtg

SEQ ID NO: 10320 - DNA, 26 bp, Homo sapiens
cagaaacctgtgctgactatgagtgg

SEQ ID NO: 10321 - DNA, 26 bp, Homo sapiens
agaaacctgtgctgactatgagtggt

SEQ ID NO: 10322 - DNA, 26 bp, Homo sapiens
gaaacctgtgctgactatgagtggtg

SEQ ID NO: 10323 - DNA, 26 bp, Homo sapiens
aaacctgtgctgactatgagtggtgt

SEQ ID NO: 10324 - DNA, 26 bp, Homo sapiens
aacctgtgctgactatgagtggtgtc

SEQ ID NO: 10325 - DNA, 26 bp, Homo sapiens
acctgtgctgactatgagtggtgtct

SEQ ID NO: 10326 - DNA, 26 bp, Homo sapiens
cctgtgctgactatgagtggtgtctg

SEQ ID NO: 10327 - DNA, 26 bp, Homo sapiens
ctgtgctgactatgagtggtgtctgg

SEQ ID NO: 10328 - DNA, 26 bp, Homo sapiens
tgtgctgactatgagtggtgtctgga

SEQ ID NO: 10329 - DNA, 26 bp, Homo sapiens
gtgctgactatgagtggtgtctggag

SEQ ID NO: 10330 - DNA, 26 bp, Homo sapiens
tgctgactatgagtggtgtctggagg

SEQ ID NO: 10331 - DNA, 26 bp, Homo sapiens
gctgactatgagtggtgtctggaggg

SEQ ID NO: 10332 - DNA, 26 bp, Homo sapiens
ctgactatgagtggtgtctggagggc

SEQ ID NO: 10333 - DNA, 26 bp, Homo sapiens
tgactatgagtggtgtctggagggcc

SEQ ID NO: 10334 - DNA, 26 bp, Homo sapiens
gactatgagtggtgtctggagggcca

SEQ ID NO: 10335 - DNA, 26 bp, Homo sapiens
actatgagtggtgtctggagggccaa

SEQ ID NO: 10336 - DNA, 26 bp, Homo sapiens
ctatgagtggtgtctggagggccaag

SEQ ID NO: 10337 - DNA, 26 bp, Homo sapiens
tatgagtggtgtctggagggccaagg

SEQ ID NO: 10338 - DNA, 26 bp, Homo sapiens
atgagtggtgtctggagggccaagga

SEQ ID NO: 10339 - DNA, 26 bp, Homo sapiens
tgagtggtgtctggagggccaaggag

SEQ ID NO: 10340 - DNA, 26 bp, Homo sapiens
gagtggtgtctggagggccaaggagg

SEQ ID NO: 10341 - DNA, 26 bp, Homo sapiens
agtggtgtctggagggccaaggaggg

SEQ ID NO: 10342 - DNA, 26 bp, Homo sapiens
gtggtgtctggagggccaaggagggg

SEQ ID NO: 10343 - DNA, 26 bp, Homo sapiens
tggtgtctggagggccaaggagggga

SEQ ID NO: 10344 - DNA, 26 bp, Homo sapiens
ggtgtctggagggccaaggaggggag

SEQ ID NO: 10345 - DNA, 26 bp, Homo sapiens
gtgtctggagggccaaggaggggagt

SEQ ID NO: 10346 - DNA, 26 bp, Homo sapiens
tgtctggagggccaaggaggggagtg

SEQ ID NO: 10347 - DNA, 26 bp, Homo sapiens
gtctggagggccaaggaggggagtgg

SEQ ID NO: 10348 - DNA, 26 bp, Homo sapiens
tctggagggccaaggaggggagtggc

SEQ ID NO: 10349 - DNA, 26 bp, Homo sapiens
ctggagggccaaggaggggagtggcc

SEQ ID NO: 10350 - DNA, 26 bp, Homo sapiens
tggagggccaaggaggggagtggcca

SEQ ID NO: 10351 - DNA, 26 bp, Homo sapiens
ggagggccaaggaggggagtggccac

SEQ ID NO: 10352 - DNA, 26 bp, Homo sapiens
gagggccaaggaggggagtggccacc

SEQ ID NO: 10353 - DNA, 26 bp, Homo sapiens
agggccaaggaggggagtggccaccc

SEQ ID NO: 10354 - DNA, 26 bp, Homo sapiens
gggccaaggaggggagtggccaccca

SEQ ID NO: 10355 - DNA, 26 bp, Homo sapiens
ggccaaggaggggagtggccacccag

SEQ ID NO: 10356 - DNA, 26 bp, Homo sapiens
gccaaggaggggagtggccacccagc

SEQ ID NO: 10357 - DNA, 26 bp, Homo sapiens
ccaaggaggggagtggccacccagca

SEQ ID NO: 10358 - DNA, 26 bp, Homo sapiens
caaggaggggagtggccacccagcag

SEQ ID NO: 10359 - DNA, 26 bp, Homo sapiens
aaggaggggagtggccacccagcagg

SEQ ID NO: 10360 - DNA, 26 bp, Homo sapiens
aggaggggagtggccacccagcagga

SEQ ID NO: 10361 - DNA, 26 bp, Homo sapiens
ggaggggagtggccacccagcaggag

SEQ ID NO: 10362 - DNA, 26 bp, Homo sapiens
gaggggagtggccacccagcaggagg

SEQ ID NO: 10363 - DNA, 26 bp, Homo sapiens
aggggagtggccacccagcaggagga

SEQ ID NO: 10364 - DNA, 26 bp, Homo sapiens
ggggagtggccacccagcaggaggag

SEQ ID NO: 10365 - DNA, 26 bp, Homo sapiens
gggagtggccacccagcaggaggagg

SEQ ID NO: 10366 - DNA, 26 bp, Homo sapiens
ggagtggccacccagcaggaggaggg

SEQ ID NO: 10367 - DNA, 26 bp, Homo sapiens
gagtggccacccagcaggaggaggga

SEQ ID NO: 10368 - DNA, 26 bp, Homo sapiens
agtggccacccagcaggaggagggag

SEQ ID NO: 10369 - DNA, 26 bp, Homo sapiens
gtggccacccagcaggaggagggagc

SEQ ID NO: 10370 - DNA, 26 bp, Homo sapiens
tggccacccagcaggaggagggagcc

SEQ ID NO: 10371 - DNA, 26 bp, Homo sapiens
ggccacccagcaggaggagggagccc

SEQ ID NO: 10372 - DNA, 26 bp, Homo sapiens
gccacccagcaggaggagggagcccc

SEQ ID NO: 10373 - DNA, 26 bp, Homo sapiens
ccacccagcaggaggagggagcccct

SEQ ID NO: 10374 - DNA, 26 bp, Homo sapiens
cacccagcaggaggagggagcccctg

SEQ ID NO: 10375 - DNA, 26 bp, Homo sapiens
acccagcaggaggagggagcccctgg

SEQ ID NO: 10376 - DNA, 26 bp, Homo sapiens
cccagcaggaggagggagcccctggg

SEQ ID NO: 10377 - DNA, 26 bp, Homo sapiens
ccagcaggaggagggagcccctggga

SEQ ID NO: 10378 - DNA, 26 bp, Homo sapiens
cagcaggaggagggagcccctgggag

SEQ ID NO: 10379 - DNA, 26 bp, Homo sapiens
agcaggaggagggagcccctgggagc

SEQ ID NO: 10380 - DNA, 26 bp, Homo sapiens
gcaggaggagggagcccctgggagct

SEQ ID NO: 10381 - DNA, 26 bp, Homo sapiens
caggaggagggagcccctgggagctg

SEQ ID NO: 10382 - DNA, 26 bp, Homo sapiens
aggaggagggagcccctgggagctga

SEQ ID NO: 10383 - DNA, 26 bp, Homo sapiens
ggaggagggagcccctgggagctgac

SEQ ID NO: 10384 - DNA, 26 bp, Homo sapiens
gaggagggagcccctgggagctgaca

SEQ ID NO: 10385 - DNA, 26 bp, Homo sapiens
aggagggagcccctgggagctgacac

SEQ ID NO: 10386 - DNA, 26 bp, Homo sapiens
ggagggagcccctgggagctgacact

SEQ ID NO: 10387 - DNA, 26 bp, Homo sapiens
gagggagcccctgggagctgacactt

SEQ ID NO: 10388 - DNA, 26 bp, Homo sapiens
agggagcccctgggagctgacacttg

SEQ ID NO: 10389 - DNA, 26 bp, Homo sapiens
gggagcccctgggagctgacacttgc

SEQ ID NO: 10390 - DNA, 26 bp, Homo sapiens
ggagcccctgggagctgacacttgca

SEQ ID NO: 10391 - DNA, 26 bp, Homo sapiens
gagcccctgggagctgacacttgcaa

SEQ ID NO: 10392 - DNA, 26 bp, Homo sapiens
agcccctgggagctgacacttgcaaa

SEQ ID NO: 10393 - DNA, 26 bp, Homo sapiens
gcccctgggagctgacacttgcaaat

SEQ ID NO: 10394 - DNA, 26 bp, Homo sapiens
cccctgggagctgacacttgcaaatg

SEQ ID NO: 10395 - DNA, 26 bp, Homo sapiens
ccctgggagctgacacttgcaaatgg

SEQ ID NO: 10396 - DNA, 26 bp, Homo sapiens
cctgggagctgacacttgcaaatggg

SEQ ID NO: 10397 - DNA, 26 bp, Homo sapiens
ctgggagctgacacttgcaaatggga

SEQ ID NO: 10398 - DNA, 26 bp, Homo sapiens
tgggagctgacacttgcaaatgggaa

SEQ ID NO: 10399 - DNA, 26 bp, Homo sapiens
gggagctgacacttgcaaatgggaag

SEQ ID NO: 10400 - DNA, 26 bp, Homo sapiens
ggagctgacacttgcaaatgggaaga

SEQ ID NO: 10401 - DNA, 26 bp, Homo sapiens
gagctgacacttgcaaatgggaagaa

SEQ ID NO: 10402 - DNA, 26 bp, Homo sapiens
agctgacacttgcaaatgggaagaaa

SEQ ID NO: 10403 - DNA, 26 bp, Homo sapiens
gctgacacttgcaaatgggaagaaag

SEQ ID NO: 10404 - DNA, 26 bp, Homo sapiens
ctgacacttgcaaatgggaagaaagg

SEQ ID NO: 10405 - DNA, 26 bp, Homo sapiens
tgacacttgcaaatgggaagaaaggc

SEQ ID NO: 10406 - DNA, 26 bp, Homo sapiens
gacacttgcaaatgggaagaaaggcc

SEQ ID NO: 10407 - DNA, 26 bp, Homo sapiens
acacttgcaaatgggaagaaaggccc

SEQ ID NO: 10408 - DNA, 26 bp, Homo sapiens
cacttgcaaatgggaagaaaggccca

SEQ ID NO: 10409 - DNA, 26 bp, Homo sapiens
acttgcaaatgggaagaaaggcccag

SEQ ID NO: 10410 - DNA, 26 bp, Homo sapiens
cttgcaaatgggaagaaaggcccagg

SEQ ID NO: 10411 - DNA, 26 bp, Homo sapiens
ttgcaaatgggaagaaaggcccaggc

SEQ ID NO: 10412 - DNA, 26 bp, Homo sapiens
tgcaaatgggaagaaaggcccaggca

SEQ ID NO: 10413 - DNA, 26 bp, Homo sapiens
gcaaatgggaagaaaggcccaggcat

SEQ ID NO: 10414 - DNA, 26 bp, Homo sapiens
caaatgggaagaaaggcccaggcatt

SEQ ID NO: 10415 - DNA, 26 bp, Homo sapiens
aaatgggaagaaaggcccaggcattg

SEQ ID NO: 10416 - DNA, 26 bp, Homo sapiens
aatgggaagaaaggcccaggcattgc

SEQ ID NO: 10417 - DNA, 26 bp, Homo sapiens
atgggaagaaaggcccaggcattgcc

SEQ ID NO: 10418 - DNA, 26 bp, Homo sapiens
tgggaagaaaggcccaggcattgccc

SEQ ID NO: 10419 - DNA, 26 bp, Homo sapiens
gggaagaaaggcccaggcattgccct

SEQ ID NO: 10420 - DNA, 26 bp, Homo sapiens
ggaagaaaggcccaggcattgccctt

SEQ ID NO: 10421 - DNA, 26 bp, Homo sapiens
gaagaaaggcccaggcattgccctta

SEQ ID NO: 10422 - DNA, 26 bp, Homo sapiens
aagaaaggcccaggcattgcccttag

SEQ ID NO: 10423 - DNA, 26 bp, Homo sapiens
agaaaggcccaggcattgcccttagg

SEQ ID NO: 10424 - DNA, 26 bp, Homo sapiens
gaaaggcccaggcattgcccttagga

SEQ ID NO: 10425 - DNA, 26 bp, Homo sapiens
aaaggcccaggcattgcccttaggag

SEQ ID NO: 10426 - DNA, 26 bp, Homo sapiens
aaggcccaggcattgcccttaggaga

SEQ ID NO: 10427 - DNA, 26 bp, Homo sapiens
aggcccaggcattgcccttaggagag

SEQ ID NO: 10428 - DNA, 26 bp, Homo sapiens
ggcccaggcattgcccttaggagagg

SEQ ID NO: 10429 - DNA, 26 bp, Homo sapiens
gcccaggcattgcccttaggagaggg

SEQ ID NO: 10430 - DNA, 26 bp, Homo sapiens
cccaggcattgcccttaggagagggc

SEQ ID NO: 10431 - DNA, 26 bp, Homo sapiens
ccaggcattgcccttaggagagggca

SEQ ID NO: 10432 - DNA, 26 bp, Homo sapiens
caggcattgcccttaggagagggcag

SEQ ID NO: 10433 - DNA, 26 bp, Homo sapiens
aggcattgcccttaggagagggcagg

SEQ ID NO: 10434 - DNA, 26 bp, Homo sapiens
ggcattgcccttaggagagggcaggg

SEQ ID NO: 10435 - DNA, 26 bp, Homo sapiens
gcattgcccttaggagagggcagggg

SEQ ID NO: 10436 - DNA, 26 bp, Homo sapiens
cattgcccttaggagagggcagggga

SEQ ID NO: 10437 - DNA, 26 bp, Homo sapiens
attgcccttaggagagggcaggggag

SEQ ID NO: 10438 - DNA, 26 bp, Homo sapiens
ttgcccttaggagagggcaggggaga

SEQ ID NO: 10439 - DNA, 26 bp, Homo sapiens
tgcccttaggagagggcaggggagaa

SEQ ID NO: 10440 - DNA, 26 bp, Homo sapiens
gcccttaggagagggcaggggagaaa

SEQ ID NO: 10441 - DNA, 26 bp, Homo sapiens
cccttaggagagggcaggggagaaac

SEQ ID NO: 10442 - DNA, 26 bp, Homo sapiens
ccttaggagagggcaggggagaaaca

SEQ ID NO: 10443 - DNA, 26 bp, Homo sapiens
cttaggagagggcaggggagaaacag

SEQ ID NO: 10444 - DNA, 26 bp, Homo sapiens
ttaggagagggcaggggagaaacagg

SEQ ID NO: 10445 - DNA, 26 bp, Homo sapiens
taggagagggcaggggagaaacaggc

SEQ ID NO: 10446 - DNA, 26 bp, Homo sapiens
aggagagggcaggggagaaacaggcc

SEQ ID NO: 10447 - DNA, 26 bp, Homo sapiens
ggagagggcaggggagaaacaggccc

SEQ ID NO: 10448 - DNA, 26 bp, Homo sapiens
gagagggcaggggagaaacaggcccc

SEQ ID NO: 10449 - DNA, 26 bp, Homo sapiens
agagggcaggggagaaacaggcccca

SEQ ID NO: 10450 - DNA, 26 bp, Homo sapiens
gagggcaggggagaaacaggccccat

SEQ ID NO: 10451 - DNA, 26 bp, Homo sapiens
agggcaggggagaaacaggccccatg

SEQ ID NO: 10452 - DNA, 26 bp, Homo sapiens
gggcaggggagaaacaggccccatgc

SEQ ID NO: 10453 - DNA, 26 bp, Homo sapiens
ggcaggggagaaacaggccccatgct

SEQ ID NO: 10454 - DNA, 26 bp, Homo sapiens
gcaggggagaaacaggccccatgctg

SEQ ID NO: 10455 - DNA, 26 bp, Homo sapiens
caggggagaaacaggccccatgctgg

SEQ ID NO: 10456 - DNA, 26 bp, Homo sapiens
aggggagaaacaggccccatgctggg

SEQ ID NO: 10457 - DNA, 26 bp, Homo sapiens
ggggagaaacaggccccatgctggga

SEQ ID NO: 10458 - DNA, 26 bp, Homo sapiens
gggagaaacaggccccatgctgggag

SEQ ID NO: 10459 - DNA, 26 bp, Homo sapiens
ggagaaacaggccccatgctgggagg

SEQ ID NO: 10460 - DNA, 26 bp, Homo sapiens
gagaaacaggccccatgctgggaggg

SEQ ID NO: 10461 - DNA, 26 bp, Homo sapiens
agaaacaggccccatgctgggagggg

SEQ ID NO: 10462 - DNA, 26 bp, Homo sapiens
gaaacaggccccatgctgggagggga

SEQ ID NO: 10463 - DNA, 26 bp, Homo sapiens
aaacaggccccatgctgggaggggaa

SEQ ID NO: 10464 - DNA, 26 bp, Homo sapiens
aacaggccccatgctgggaggggaag

SEQ ID NO: 10465 - DNA, 26 bp, Homo sapiens
acaggccccatgctgggaggggaagg

SEQ ID NO: 10466 - DNA, 26 bp, Homo sapiens
caggccccatgctgggaggggaagga

SEQ ID NO: 10467 - DNA, 26 bp, Homo sapiens
aggccccatgctgggaggggaaggag

SEQ ID NO: 10468 - DNA, 26 bp, Homo sapiens
ggccccatgctgggaggggaaggagt

SEQ ID NO: 10469 - DNA, 26 bp, Homo sapiens
gccccatgctgggaggggaaggagtg

SEQ ID NO: 10470 - DNA, 26 bp, Homo sapiens
ccccatgctgggaggggaaggagtga

SEQ ID NO: 10471 - DNA, 26 bp, Homo sapiens
cccatgctgggaggggaaggagtgat

SEQ ID NO: 10472 - DNA, 26 bp, Homo sapiens
ccatgctgggaggggaaggagtgata

SEQ ID NO: 10473 - DNA, 26 bp, Homo sapiens
catgctgggaggggaaggagtgataa

SEQ ID NO: 10474 - DNA, 26 bp, Homo sapiens
atgctgggaggggaaggagtgataag

SEQ ID NO: 10475 - DNA, 26 bp, Homo sapiens
tgctgggaggggaaggagtgataagc

SEQ ID NO: 10476 - DNA, 26 bp, Homo sapiens
gctgggaggggaaggagtgataagcc

SEQ ID NO: 10477 - DNA, 26 bp, Homo sapiens
ctgggaggggaaggagtgataagcca

SEQ ID NO: 10478 - DNA, 26 bp, Homo sapiens
tgggaggggaaggagtgataagccaa

SEQ ID NO: 10479 - DNA, 26 bp, Homo sapiens
gggaggggaaggagtgataagccaaa

SEQ ID NO: 10480 - DNA, 26 bp, Homo sapiens
ggaggggaaggagtgataagccaaag

SEQ ID NO: 10481 - DNA, 26 bp, Homo sapiens
gaggggaaggagtgataagccaaaga

SEQ ID NO: 10482 - DNA, 26 bp, Homo sapiens
aggggaaggagtgataagccaaagaa

SEQ ID NO: 10483 - DNA, 26 bp, Homo sapiens
ggggaaggagtgataagccaaagaat

SEQ ID NO: 10484 - DNA, 26 bp, Homo sapiens
gggaaggagtgataagccaaagaata

SEQ ID NO: 10485 - DNA, 26 bp, Homo sapiens
ggaaggagtgataagccaaagaatag

SEQ ID NO: 10486 - DNA, 26 bp, Homo sapiens
gaaggagtgataagccaaagaatagg

SEQ ID NO: 10487 - DNA, 26 bp, Homo sapiens
aaggagtgataagccaaagaataggg

SEQ ID NO: 10488 - DNA, 26 bp, Homo sapiens
aggagtgataagccaaagaataggga

SEQ ID NO: 10489 - DNA, 26 bp, Homo sapiens
ggagtgataagccaaagaatagggac

SEQ ID NO: 10490 - DNA, 26 bp, Homo sapiens
gagtgataagccaaagaatagggaca

SEQ ID NO: 10491 - DNA, 26 bp, Homo sapiens
agtgataagccaaagaatagggacag

SEQ ID NO: 10492 - DNA, 26 bp, Homo sapiens
gtgataagccaaagaatagggacagg

SEQ ID NO: 10493 - DNA, 26 bp, Homo sapiens
tgataagccaaagaatagggacaggg

SEQ ID NO: 10494 - DNA, 26 bp, Homo sapiens
gataagccaaagaatagggacagggt

SEQ ID NO: 10495 - DNA, 26 bp, Homo sapiens
ataagccaaagaatagggacagggtg

SEQ ID NO: 10496 - DNA, 26 bp, Homo sapiens
taagccaaagaatagggacagggtgg

SEQ ID NO: 10497 - DNA, 26 bp, Homo sapiens
aagccaaagaatagggacagggtggt

SEQ ID NO: 10498 - DNA, 26 bp, Homo sapiens
agccaaagaatagggacagggtggtg

SEQ ID NO: 10499 - DNA, 26 bp, Homo sapiens
gccaaagaatagggacagggtggtgg

SEQ ID NO: 10500 - DNA, 26 bp, Homo sapiens
ccaaagaatagggacagggtggtggc

SEQ ID NO: 10501 - DNA, 26 bp, Homo sapiens
caaagaatagggacagggtggtggcc

SEQ ID NO: 10502 - DNA, 26 bp, Homo sapiens
aaagaatagggacagggtggtggcca

SEQ ID NO: 10503 - DNA, 26 bp, Homo sapiens
aagaatagggacagggtggtggccaa

SEQ ID NO: 10504 - DNA, 26 bp, Homo sapiens
agaatagggacagggtggtggccaag

SEQ ID NO: 10505 - DNA, 26 bp, Homo sapiens
gaatagggacagggtggtggccaagc

SEQ ID NO: 10506 - DNA, 26 bp, Homo sapiens
aatagggacagggtggtggccaagca

SEQ ID NO: 10507 - DNA, 26 bp, Homo sapiens
atagggacagggtggtggccaagcag

SEQ ID NO: 10508 - DNA, 26 bp, Homo sapiens
tagggacagggtggtggccaagcagc

SEQ ID NO: 10509 - DNA, 26 bp, Homo sapiens
agggacagggtggtggccaagcagcc

SEQ ID NO: 10510 - DNA, 26 bp, Homo sapiens
gggacagggtggtggccaagcagcct

SEQ ID NO: 10511 - DNA, 26 bp, Homo sapiens
ggacagggtggtggccaagcagcctg

SEQ ID NO: 10512 - DNA, 26 bp, Homo sapiens
gacagggtggtggccaagcagcctga

SEQ ID NO: 10513 - DNA, 26 bp, Homo sapiens
acagggtggtggccaagcagcctgag

SEQ ID NO: 10514 - DNA, 26 bp, Homo sapiens
cagggtggtggccaagcagcctgaga

SEQ ID NO: 10515 - DNA, 26 bp, Homo sapiens
agggtggtggccaagcagcctgagac

SEQ ID NO: 10516 - DNA, 26 bp, Homo sapiens
gggtggtggccaagcagcctgagacc

SEQ ID NO: 10517 - DNA, 26 bp, Homo sapiens
ggtggtggccaagcagcctgagacca

SEQ ID NO: 10518 - DNA, 26 bp, Homo sapiens
gtggtggccaagcagcctgagaccag

SEQ ID NO: 10519 - DNA, 26 bp, Homo sapiens
tggtggccaagcagcctgagaccagc

SEQ ID NO: 10520 - DNA, 26 bp, Homo sapiens
ggtggccaagcagcctgagaccagct

SEQ ID NO: 10521 - DNA, 26 bp, Homo sapiens
gtggccaagcagcctgagaccagcta

SEQ ID NO: 10522 - DNA, 26 bp, Homo sapiens
tggccaagcagcctgagaccagctac

SEQ ID NO: 10523 - DNA, 26 bp, Homo sapiens
ggccaagcagcctgagaccagctact

SEQ ID NO: 10524 - DNA, 26 bp, Homo sapiens
gccaagcagcctgagaccagctactg

SEQ ID NO: 10525 - DNA, 26 bp, Homo sapiens
ccaagcagcctgagaccagctactgc

SEQ ID NO: 10526 - DNA, 26 bp, Homo sapiens
caagcagcctgagaccagctactgct

SEQ ID NO: 10527 - DNA, 26 bp, Homo sapiens
aagcagcctgagaccagctactgctg

SEQ ID NO: 10528 - DNA, 26 bp, Homo sapiens
agcagcctgagaccagctactgctgg

SEQ ID NO: 10529 - DNA, 26 bp, Homo sapiens
gcagcctgagaccagctactgctggg

SEQ ID NO: 10530 - DNA, 26 bp, Homo sapiens
cagcctgagaccagctactgctgggg

SEQ ID NO: 10531 - DNA, 26 bp, Homo sapiens
agcctgagaccagctactgctggggg

SEQ ID NO: 10532 - DNA, 26 bp, Homo sapiens
gcctgagaccagctactgctgggggc

SEQ ID NO: 10533 - DNA, 26 bp, Homo sapiens
cctgagaccagctactgctgggggcc

SEQ ID NO: 10534 - DNA, 26 bp, Homo sapiens
ctgagaccagctactgctgggggccc

SEQ ID NO: 10535 - DNA, 26 bp, Homo sapiens
tgagaccagctactgctgggggccca

SEQ ID NO: 10536 - DNA, 26 bp, Homo sapiens
gagaccagctactgctgggggcccag

SEQ ID NO: 10537 - DNA, 26 bp, Homo sapiens
agaccagctactgctgggggcccagc

SEQ ID NO: 10538 - DNA, 26 bp, Homo sapiens
gaccagctactgctgggggcccagct

SEQ ID NO: 10539 - DNA, 26 bp, Homo sapiens
accagctactgctgggggcccagctc

SEQ ID NO: 10540 - DNA, 26 bp, Homo sapiens
ccagctactgctgggggcccagctcc

SEQ ID NO: 10541 - DNA, 26 bp, Homo sapiens
cagctactgctgggggcccagctccc

SEQ ID NO: 10542 - DNA, 26 bp, Homo sapiens
agctactgctgggggcccagctccca

SEQ ID NO: 10543 - DNA, 26 bp, Homo sapiens
gctactgctgggggcccagctcccaa

SEQ ID NO: 10544 - DNA, 26 bp, Homo sapiens
ctactgctgggggcccagctcccaat

SEQ ID NO: 10545 - DNA, 26 bp, Homo sapiens
tactgctgggggcccagctcccaatg

SEQ ID NO: 10546 - DNA, 26 bp, Homo sapiens
actgctgggggcccagctcccaatgg

SEQ ID NO: 10547 - DNA, 26 bp, Homo sapiens
ctgctgggggcccagctcccaatggg

SEQ ID NO: 10548 - DNA, 26 bp, Homo sapiens
tgctgggggcccagctcccaatgggg

SEQ ID NO: 10549 - DNA, 26 bp, Homo sapiens
gctgggggcccagctcccaatggggg

SEQ ID NO: 10550 - DNA, 26 bp, Homo sapiens
ctgggggcccagctcccaatggggga

SEQ ID NO: 10551 - DNA, 26 bp, Homo sapiens
tgggggcccagctcccaatgggggag

SEQ ID NO: 10552 - DNA, 26 bp, Homo sapiens
gggggcccagctcccaatgggggagg

SEQ ID NO: 10553 - DNA, 26 bp, Homo sapiens
ggggcccagctcccaatgggggaggg

SEQ ID NO: 10554 - DNA, 26 bp, Homo sapiens
gggcccagctcccaatgggggaggga

SEQ ID NO: 10555 - DNA, 26 bp, Homo sapiens
ggcccagctcccaatgggggagggac

SEQ ID NO: 10556 - DNA, 26 bp, Homo sapiens
gcccagctcccaatgggggagggaca

SEQ ID NO: 10557 - DNA, 26 bp, Homo sapiens
cccagctcccaatgggggagggacag

SEQ ID NO: 10558 - DNA, 26 bp, Homo sapiens
ccagctcccaatgggggagggacaga

SEQ ID NO: 10559 - DNA, 26 bp, Homo sapiens
cagctcccaatgggggagggacagag

SEQ ID NO: 10560 - DNA, 26 bp, Homo sapiens
agctcccaatgggggagggacagaga

SEQ ID NO: 10561 - DNA, 26 bp, Homo sapiens
gctcccaatgggggagggacagagag

SEQ ID NO: 10562 - DNA, 26 bp, Homo sapiens
ctcccaatgggggagggacagagaga

SEQ ID NO: 10563 - DNA, 26 bp, Homo sapiens
tcccaatgggggagggacagagagac

SEQ ID NO: 10564 - DNA, 26 bp, Homo sapiens
cccaatgggggagggacagagagacc

SEQ ID NO: 10565 - DNA, 26 bp, Homo sapiens
ccaatgggggagggacagagagaccc

SEQ ID NO: 10566 - DNA, 26 bp, Homo sapiens
caatgggggagggacagagagacccc

SEQ ID NO: 10567 - DNA, 26 bp, Homo sapiens
aatgggggagggacagagagacccca

SEQ ID NO: 10568 - DNA, 26 bp, Homo sapiens
atgggggagggacagagagaccccat

SEQ ID NO: 10569 - DNA, 26 bp, Homo sapiens
tgggggagggacagagagaccccatg

SEQ ID NO: 10570 - DNA, 26 bp, Homo sapiens
gggggagggacagagagaccccatgg

SEQ ID NO: 10571 - DNA, 26 bp, Homo sapiens
ggggagggacagagagaccccatggg

SEQ ID NO: 10572 - DNA, 26 bp, Homo sapiens
gggagggacagagagaccccatgggg

SEQ ID NO: 10573 - DNA, 26 bp, Homo sapiens
ggagggacagagagaccccatggggg

SEQ ID NO: 10574 - DNA, 26 bp, Homo sapiens
gagggacagagagaccccatgggggt

SEQ ID NO: 10575 - DNA, 26 bp, Homo sapiens
agggacagagagaccccatgggggtc

SEQ ID NO: 10576 - DNA, 26 bp, Homo sapiens
gggacagagagaccccatgggggtcc

SEQ ID NO: 10577 - DNA, 26 bp, Homo sapiens
ggacagagagaccccatgggggtccc

SEQ ID NO: 10578 - DNA, 26 bp, Homo sapiens
gacagagagaccccatgggggtcccc

SEQ ID NO: 10579 - DNA, 26 bp, Homo sapiens
acagagagaccccatgggggtcccca

SEQ ID NO: 10580 - DNA, 26 bp, Homo sapiens
cagagagaccccatgggggtccccaa

SEQ ID NO: 10581 - DNA, 26 bp, Homo sapiens
agagagaccccatgggggtccccaaa

SEQ ID NO: 10582 - DNA, 26 bp, Homo sapiens
gagagaccccatgggggtccccaaag

SEQ ID NO: 10583 - DNA, 26 bp, Homo sapiens
agagaccccatgggggtccccaaagt

SEQ ID NO: 10584 - DNA, 26 bp, Homo sapiens
gagaccccatgggggtccccaaagtt

SEQ ID NO: 10585 - DNA, 26 bp, Homo sapiens
agaccccatgggggtccccaaagttg

SEQ ID NO: 10586 - DNA, 26 bp, Homo sapiens
gaccccatgggggtccccaaagttgc

SEQ ID NO: 10587 - DNA, 26 bp, Homo sapiens
accccatgggggtccccaaagttgca

SEQ ID NO: 10588 - DNA, 26 bp, Homo sapiens
ccccatgggggtccccaaagttgcat

SEQ ID NO: 10589 - DNA, 26 bp, Homo sapiens
cccatgggggtccccaaagttgcata

SEQ ID NO: 10590 - DNA, 26 bp, Homo sapiens
ccatgggggtccccaaagttgcatat

SEQ ID NO: 10591 - DNA, 26 bp, Homo sapiens
catgggggtccccaaagttgcatatt

SEQ ID NO: 10592 - DNA, 26 bp, Homo sapiens
atgggggtccccaaagttgcatattt

SEQ ID NO: 10593 - DNA, 26 bp, Homo sapiens
tgggggtccccaaagttgcatattta

SEQ ID NO: 10594 - DNA, 26 bp, Homo sapiens
gggggtccccaaagttgcatatttaa

SEQ ID NO: 10595 - DNA, 26 bp, Homo sapiens
ggggtccccaaagttgcatatttaac

SEQ ID NO: 10596 - DNA, 26 bp, Homo sapiens
gggtccccaaagttgcatatttaaca

SEQ ID NO: 10597 - DNA, 26 bp, Homo sapiens
ggtccccaaagttgcatatttaacat

SEQ ID NO: 10598 - DNA, 26 bp, Homo sapiens
gtccccaaagttgcatatttaacatg

SEQ ID NO: 10599 - DNA, 26 bp, Homo sapiens
tccccaaagttgcatatttaacatgg

SEQ ID NO: 10600 - DNA, 26 bp, Homo sapiens
ccccaaagttgcatatttaacatggt

SEQ ID NO: 10601 - DNA, 26 bp, Homo sapiens
cccaaagttgcatatttaacatggtt

SEQ ID NO: 10602 - DNA, 26 bp, Homo sapiens
ccaaagttgcatatttaacatggttt

SEQ ID NO: 10603 - DNA, 26 bp, Homo sapiens
caaagttgcatatttaacatggtttg

SEQ ID NO: 10604 - DNA, 26 bp, Homo sapiens
aaagttgcatatttaacatggtttgc

SEQ ID NO: 10605 - DNA, 26 bp, Homo sapiens
aagttgcatatttaacatggtttgca

SEQ ID NO: 10606 - DNA, 26 bp, Homo sapiens
agttgcatatttaacatggtttgcat

SEQ ID NO: 10607 - DNA, 26 bp, Homo sapiens
gttgcatatttaacatggtttgcata

SEQ ID NO: 10608 - DNA, 26 bp, Homo sapiens
ttgcatatttaacatggtttgcatat

SEQ ID NO: 10609 - DNA, 26 bp, Homo sapiens
tgcatatttaacatggtttgcatata

SEQ ID NO: 10610 - DNA, 26 bp, Homo sapiens
gcatatttaacatggtttgcatatat

SEQ ID NO: 10611 - DNA, 26 bp, Homo sapiens
catatttaacatggtttgcatatatg

SEQ ID NO: 10612 - DNA, 26 bp, Homo sapiens
atatttaacatggtttgcatatatgg

SEQ ID NO: 10613 - DNA, 26 bp, Homo sapiens
tatttaacatggtttgcatatatggt

SEQ ID NO: 10614 - DNA, 26 bp, Homo sapiens
atttaacatggtttgcatatatggtg

SEQ ID NO: 10615 - DNA, 26 bp, Homo sapiens
tttaacatggtttgcatatatggtgt

SEQ ID NO: 10616 - DNA, 26 bp, Homo sapiens
ttaacatggtttgcatatatggtgtc

SEQ ID NO: 10617 - DNA, 26 bp, Homo sapiens
taacatggtttgcatatatggtgtcc

SEQ ID NO: 10618 - DNA, 26 bp, Homo sapiens
aacatggtttgcatatatggtgtcca

SEQ ID NO: 10619 - DNA, 26 bp, Homo sapiens
acatggtttgcatatatggtgtccac

SEQ ID NO: 10620 - DNA, 26 bp, Homo sapiens
catggtttgcatatatggtgtccacc

SEQ ID NO: 10621 - DNA, 26 bp, Homo sapiens
atggtttgcatatatggtgtccacct

SEQ ID NO: 10622 - DNA, 26 bp, Homo sapiens
tggtttgcatatatggtgtccacctg

SEQ ID NO: 10623 - DNA, 26 bp, Homo sapiens
ggtttgcatatatggtgtccacctgc

SEQ ID NO: 10624 - DNA, 26 bp, Homo sapiens
gtttgcatatatggtgtccacctgcc

SEQ ID NO: 10625 - DNA, 26 bp, Homo sapiens
tttgcatatatggtgtccacctgcct

SEQ ID NO: 10626 - DNA, 26 bp, Homo sapiens
ttgcatatatggtgtccacctgcctt

SEQ ID NO: 10627 - DNA, 26 bp, Homo sapiens
tgcatatatggtgtccacctgccttg

SEQ ID NO: 10628 - DNA, 26 bp, Homo sapiens
gcatatatggtgtccacctgccttgt

SEQ ID NO: 10629 - DNA, 26 bp, Homo sapiens
catatatggtgtccacctgccttgtg

SEQ ID NO: 10630 - DNA, 26 bp, Homo sapiens
atatatggtgtccacctgccttgtgg

SEQ ID NO: 10631 - DNA, 26 bp, Homo sapiens
tatatggtgtccacctgccttgtggc

SEQ ID NO: 10632 - DNA, 26 bp, Homo sapiens
atatggtgtccacctgccttgtggca

SEQ ID NO: 10633 - DNA, 26 bp, Homo sapiens
tatggtgtccacctgccttgtggcag

SEQ ID NO: 10634 - DNA, 26 bp, Homo sapiens
atggtgtccacctgccttgtggcagg

SEQ ID NO: 10635 - DNA, 26 bp, Homo sapiens
tggtgtccacctgccttgtggcaggg

SEQ ID NO: 10636 - DNA, 26 bp, Homo sapiens
ggtgtccacctgccttgtggcagggt

SEQ ID NO: 10637 - DNA, 26 bp, Homo sapiens
gtgtccacctgccttgtggcagggtc

SEQ ID NO: 10638 - DNA, 26 bp, Homo sapiens
tgtccacctgccttgtggcagggtcc

SEQ ID NO: 10639 - DNA, 26 bp, Homo sapiens
gtccacctgccttgtggcagggtcct

SEQ ID NO: 10640 - DNA, 26 bp, Homo sapiens
tccacctgccttgtggcagggtcctg

SEQ ID NO: 10641 - DNA, 26 bp, Homo sapiens
ccacctgccttgtggcagggtcctgt

SEQ ID NO: 10642 - DNA, 26 bp, Homo sapiens
cacctgccttgtggcagggtcctgtg

SEQ ID NO: 10643 - DNA, 26 bp, Homo sapiens
acctgccttgtggcagggtcctgtgc

SEQ ID NO: 10644 - DNA, 26 bp, Homo sapiens
cctgccttgtggcagggtcctgtgct

SEQ ID NO: 10645 - DNA, 26 bp, Homo sapiens
ctgccttgtggcagggtcctgtgctt

SEQ ID NO: 10646 - DNA, 26 bp, Homo sapiens
tgccttgtggcagggtcctgtgcttt

SEQ ID NO: 10647 - DNA, 26 bp, Homo sapiens
gccttgtggcagggtcctgtgctttg

SEQ ID NO: 10648 - DNA, 26 bp, Homo sapiens
ccttgtggcagggtcctgtgctttgt

SEQ ID NO: 10649 - DNA, 26 bp, Homo sapiens
cttgtggcagggtcctgtgctttgtg

SEQ ID NO: 10650 - DNA, 26 bp, Homo sapiens
ttgtggcagggtcctgtgctttgtgg

SEQ ID NO: 10651 - DNA, 26 bp, Homo sapiens
tgtggcagggtcctgtgctttgtggg

SEQ ID NO: 10652 - DNA, 26 bp, Homo sapiens
gtggcagggtcctgtgctttgtgggt

SEQ ID NO: 10653 - DNA, 26 bp, Homo sapiens
tggcagggtcctgtgctttgtgggta

SEQ ID NO: 10654 - DNA, 26 bp, Homo sapiens
ggcagggtcctgtgctttgtgggtac

SEQ ID NO: 10655 - DNA, 26 bp, Homo sapiens
gcagggtcctgtgctttgtgggtacc

SEQ ID NO: 10656 - DNA, 26 bp, Homo sapiens
cagggtcctgtgctttgtgggtacct

SEQ ID NO: 10657 - DNA, 26 bp, Homo sapiens
agggtcctgtgctttgtgggtacctg

SEQ ID NO: 10658 - DNA, 26 bp, Homo sapiens
gggtcctgtgctttgtgggtacctgt

SEQ ID NO: 10659 - DNA, 26 bp, Homo sapiens
ggtcctgtgctttgtgggtacctgtg

SEQ ID NO: 10660 - DNA, 26 bp, Homo sapiens
gtcctgtgctttgtgggtacctgtgg

SEQ ID NO: 10661 - DNA, 26 bp, Homo sapiens
tcctgtgctttgtgggtacctgtggg

SEQ ID NO: 10662 - DNA, 26 bp, Homo sapiens
cctgtgctttgtgggtacctgtgggg

SEQ ID NO: 10663 - DNA, 26 bp, Homo sapiens
ctgtgctttgtgggtacctgtggggg

SEQ ID NO: 10664 - DNA, 26 bp, Homo sapiens
tgtgctttgtgggtacctgtgggggc

SEQ ID NO: 10665 - DNA, 26 bp, Homo sapiens
gtgctttgtgggtacctgtgggggca

SEQ ID NO: 10666 - DNA, 26 bp, Homo sapiens
tgctttgtgggtacctgtgggggcac

SEQ ID NO: 10667 - DNA, 26 bp, Homo sapiens
gctttgtgggtacctgtgggggcacc

SEQ ID NO: 10668 - DNA, 26 bp, Homo sapiens
ctttgtgggtacctgtgggggcacct

SEQ ID NO: 10669 - DNA, 26 bp, Homo sapiens
tttgtgggtacctgtgggggcacctt

SEQ ID NO: 10670 - DNA, 26 bp, Homo sapiens
ttgtgggtacctgtgggggcaccttg

SEQ ID NO: 10671 - DNA, 26 bp, Homo sapiens
tgtgggtacctgtgggggcaccttgg

SEQ ID NO: 10672 - DNA, 26 bp, Homo sapiens
gtgggtacctgtgggggcaccttggc

SEQ ID NO: 10673 - DNA, 26 bp, Homo sapiens
tgggtacctgtgggggcaccttggcc

SEQ ID NO: 10674 - DNA, 26 bp, Homo sapiens
gggtacctgtgggggcaccttggccc

SEQ ID NO: 10675 - DNA, 26 bp, Homo sapiens
ggtacctgtgggggcaccttggccca

SEQ ID NO: 10676 - DNA, 26 bp, Homo sapiens
gtacctgtgggggcaccttggcccac

SEQ ID NO: 10677 - DNA, 26 bp, Homo sapiens
tacctgtgggggcaccttggcccacc

SEQ ID NO: 10678 - DNA, 26 bp, Homo sapiens
acctgtgggggcaccttggcccaccc

SEQ ID NO: 10679 - DNA, 26 bp, Homo sapiens
cctgtgggggcaccttggcccacccc

SEQ ID NO: 10680 - DNA, 26 bp, Homo sapiens
ctgtgggggcaccttggcccaccccc

SEQ ID NO: 10681 - DNA, 26 bp, Homo sapiens
tgtgggggcaccttggcccaccccca

SEQ ID NO: 10682 - DNA, 26 bp, Homo sapiens
gtgggggcaccttggcccacccccaa

SEQ ID NO: 10683 - DNA, 26 bp, Homo sapiens
tgggggcaccttggcccacccccaag

SEQ ID NO: 10684 - DNA, 26 bp, Homo sapiens
gggggcaccttggcccacccccaagt

SEQ ID NO: 10685 - DNA, 26 bp, Homo sapiens
ggggcaccttggcccacccccaagtg

SEQ ID NO: 10686 - DNA, 26 bp, Homo sapiens
gggcaccttggcccacccccaagtgg

SEQ ID NO: 10687 - DNA, 26 bp, Homo sapiens
ggcaccttggcccacccccaagtggg

SEQ ID NO: 10688 - DNA, 26 bp, Homo sapiens
gcaccttggcccacccccaagtgggg

SEQ ID NO: 10689 - DNA, 26 bp, Homo sapiens
caccttggcccacccccaagtggggc

SEQ ID NO: 10690 - DNA, 26 bp, Homo sapiens
accttggcccacccccaagtggggcg

SEQ ID NO: 10691 - DNA, 26 bp, Homo sapiens
ccttggcccacccccaagtggggcgg

SEQ ID NO: 10692 - DNA, 26 bp, Homo sapiens
cttggcccacccccaagtggggcggg

SEQ ID NO: 10693 - DNA, 26 bp, Homo sapiens
ttggcccacccccaagtggggcgggg

SEQ ID NO: 10694 - DNA, 26 bp, Homo sapiens
tggcccacccccaagtggggcgggga

SEQ ID NO: 10695 - DNA, 26 bp, Homo sapiens
ggcccacccccaagtggggcggggac

SEQ ID NO: 10696 - DNA, 26 bp, Homo sapiens
gcccacccccaagtggggcggggact

SEQ ID NO: 10697 - DNA, 26 bp, Homo sapiens
cccacccccaagtggggcggggactt

SEQ ID NO: 10698 - DNA, 26 bp, Homo sapiens
ccacccccaagtggggcggggacttg

SEQ ID NO: 10699 - DNA, 26 bp, Homo sapiens
cacccccaagtggggcggggacttgg

SEQ ID NO: 10700 - DNA, 26 bp, Homo sapiens
acccccaagtggggcggggacttggc

SEQ ID NO: 10701 - DNA, 26 bp, Homo sapiens
cccccaagtggggcggggacttggcg

SEQ ID NO: 10702 - DNA, 26 bp, Homo sapiens
ccccaagtggggcggggacttggcgg

SEQ ID NO: 10703 - DNA, 26 bp, Homo sapiens
cccaagtggggcggggacttggcggg

SEQ ID NO: 10704 - DNA, 26 bp, Homo sapiens
ccaagtggggcggggacttggcggga

SEQ ID NO: 10705 - DNA, 26 bp, Homo sapiens
caagtggggcggggacttggcgggag

SEQ ID NO: 10706 - DNA, 26 bp, Homo sapiens
aagtggggcggggacttggcgggagg

SEQ ID NO: 10707 - DNA, 26 bp, Homo sapiens
agtggggcggggacttggcgggaggg

SEQ ID NO: 10708 - DNA, 26 bp, Homo sapiens
gtggggcggggacttggcgggagggc

SEQ ID NO: 10709 - DNA, 26 bp, Homo sapiens
tggggcggggacttggcgggagggct

SEQ ID NO: 10710 - DNA, 26 bp, Homo sapiens
ggggcggggacttggcgggagggctt

SEQ ID NO: 10711 - DNA, 26 bp, Homo sapiens
gggcggggacttggcgggagggcttc

SEQ ID NO: 10712 - DNA, 26 bp, Homo sapiens
ggcggggacttggcgggagggcttcc

SEQ ID NO: 10713 - DNA, 26 bp, Homo sapiens
gcggggacttggcgggagggcttccc

SEQ ID NO: 10714 - DNA, 26 bp, Homo sapiens
cggggacttggcgggagggcttccct

SEQ ID NO: 10715 - DNA, 26 bp, Homo sapiens
ggggacttggcgggagggcttccctg

SEQ ID NO: 10716 - DNA, 26 bp, Homo sapiens
gggacttggcgggagggcttccctgc

SEQ ID NO: 10717 - DNA, 26 bp, Homo sapiens
ggacttggcgggagggcttccctgct

SEQ ID NO: 10718 - DNA, 26 bp, Homo sapiens
gacttggcgggagggcttccctgctg

SEQ ID NO: 10719 - DNA, 26 bp, Homo sapiens
acttggcgggagggcttccctgctgt

SEQ ID NO: 10720 - DNA, 26 bp, Homo sapiens
cttggcgggagggcttccctgctgtg

SEQ ID NO: 10721 - DNA, 26 bp, Homo sapiens
ttggcgggagggcttccctgctgtgt

SEQ ID NO: 10722 - DNA, 26 bp, Homo sapiens
tggcgggagggcttccctgctgtgtc

SEQ ID NO: 10723 - DNA, 26 bp, Homo sapiens
ggcgggagggcttccctgctgtgtcc

SEQ ID NO: 10724 - DNA, 26 bp, Homo sapiens
gcgggagggcttccctgctgtgtccg

SEQ ID NO: 10725 - DNA, 26 bp, Homo sapiens
cgggagggcttccctgctgtgtccga

SEQ ID NO: 10726 - DNA, 26 bp, Homo sapiens
gggagggcttccctgctgtgtccgaa

SEQ ID NO: 10727 - DNA, 26 bp, Homo sapiens
ggagggcttccctgctgtgtccgaag

SEQ ID NO: 10728 - DNA, 26 bp, Homo sapiens
gagggcttccctgctgtgtccgaagg

SEQ ID NO: 10729 - DNA, 26 bp, Homo sapiens
agggcttccctgctgtgtccgaaggg

SEQ ID NO: 10730 - DNA, 26 bp, Homo sapiens
gggcttccctgctgtgtccgaagggt

SEQ ID NO: 10731 - DNA, 26 bp, Homo sapiens
ggcttccctgctgtgtccgaagggtg

SEQ ID NO: 10732 - DNA, 26 bp, Homo sapiens
gcttccctgctgtgtccgaagggtgg

SEQ ID NO: 10733 - DNA, 26 bp, Homo sapiens
cttccctgctgtgtccgaagggtggg

SEQ ID NO: 10734 - DNA, 26 bp, Homo sapiens
ttccctgctgtgtccgaagggtgggc

SEQ ID NO: 10735 - DNA, 26 bp, Homo sapiens
tccctgctgtgtccgaagggtgggcc

SEQ ID NO: 10736 - DNA, 26 bp, Homo sapiens
ccctgctgtgtccgaagggtgggcca

SEQ ID NO: 10737 - DNA, 26 bp, Homo sapiens
cctgctgtgtccgaagggtgggccag

SEQ ID NO: 10738 - DNA, 26 bp, Homo sapiens
ctgctgtgtccgaagggtgggccaga

SEQ ID NO: 10739 - DNA, 26 bp, Homo sapiens
tgctgtgtccgaagggtgggccagag

SEQ ID NO: 10740 - DNA, 26 bp, Homo sapiens
gctgtgtccgaagggtgggccagaga

SEQ ID NO: 10741 - DNA, 26 bp, Homo sapiens
ctgtgtccgaagggtgggccagagac

SEQ ID NO: 10742 - DNA, 26 bp, Homo sapiens
tgtgtccgaagggtgggccagagacc

SEQ ID NO: 10743 - DNA, 26 bp, Homo sapiens
gtgtccgaagggtgggccagagacct

SEQ ID NO: 10744 - DNA, 26 bp, Homo sapiens
tgtccgaagggtgggccagagacctc

SEQ ID NO: 10745 - DNA, 26 bp, Homo sapiens
gtccgaagggtgggccagagacctca

SEQ ID NO: 10746 - DNA, 26 bp, Homo sapiens
tccgaagggtgggccagagacctcac

SEQ ID NO: 10747 - DNA, 26 bp, Homo sapiens
ccgaagggtgggccagagacctcacc

SEQ ID NO: 10748 - DNA, 26 bp, Homo sapiens
cgaagggtgggccagagacctcacct

SEQ ID NO: 10749 - DNA, 26 bp, Homo sapiens
gaagggtgggccagagacctcacctt

SEQ ID NO: 10750 - DNA, 26 bp, Homo sapiens
aagggtgggccagagacctcaccttg

SEQ ID NO: 10751 - DNA, 26 bp, Homo sapiens
agggtgggccagagacctcaccttgc

SEQ ID NO: 10752 - DNA, 26 bp, Homo sapiens
gggtgggccagagacctcaccttgca

SEQ ID NO: 10753 - DNA, 26 bp, Homo sapiens
ggtgggccagagacctcaccttgcat

SEQ ID NO: 10754 - DNA, 26 bp, Homo sapiens
gtgggccagagacctcaccttgcata

SEQ ID NO: 10755 - DNA, 26 bp, Homo sapiens
tgggccagagacctcaccttgcatag

SEQ ID NO: 10756 - DNA, 26 bp, Homo sapiens
gggccagagacctcaccttgcatagc

SEQ ID NO: 10757 - DNA, 26 bp, Homo sapiens
ggccagagacctcaccttgcatagct

SEQ ID NO: 10758 - DNA, 26 bp, Homo sapiens
gccagagacctcaccttgcatagctg

SEQ ID NO: 10759 - DNA, 26 bp, Homo sapiens
ccagagacctcaccttgcatagctgg

SEQ ID NO: 10760 - DNA, 26 bp, Homo sapiens
cagagacctcaccttgcatagctgga

SEQ ID NO: 10761 - DNA, 26 bp, Homo sapiens
agagacctcaccttgcatagctggaa

SEQ ID NO: 10762 - DNA, 26 bp, Homo sapiens
gagacctcaccttgcatagctggaag

SEQ ID NO: 10763 - DNA, 26 bp, Homo sapiens
agacctcaccttgcatagctggaagc

SEQ ID NO: 10764 - DNA, 26 bp, Homo sapiens
gacctcaccttgcatagctggaagct

SEQ ID NO: 10765 - DNA, 26 bp, Homo sapiens
acctcaccttgcatagctggaagctg

SEQ ID NO: 10766 - DNA, 26 bp, Homo sapiens
cctcaccttgcatagctggaagctgg

SEQ ID NO: 10767 - DNA, 26 bp, Homo sapiens
ctcaccttgcatagctggaagctggg

SEQ ID NO: 10768 - DNA, 26 bp, Homo sapiens
tcaccttgcatagctggaagctgggt

SEQ ID NO: 10769 - DNA, 26 bp, Homo sapiens
caccttgcatagctggaagctgggtc

SEQ ID NO: 10770 - DNA, 26 bp, Homo sapiens
accttgcatagctggaagctgggtca

SEQ ID NO: 10771 - DNA, 26 bp, Homo sapiens
ccttgcatagctggaagctgggtcag

SEQ ID NO: 10772 - DNA, 26 bp, Homo sapiens
cttgcatagctggaagctgggtcagg

SEQ ID NO: 10773 - DNA, 26 bp, Homo sapiens
ttgcatagctggaagctgggtcaggg

SEQ ID NO: 10774 - DNA, 26 bp, Homo sapiens
tgcatagctggaagctgggtcagggc

SEQ ID NO: 10775 - DNA, 26 bp, Homo sapiens
gcatagctggaagctgggtcagggcc

SEQ ID NO: 10776 - DNA, 26 bp, Homo sapiens
catagctggaagctgggtcagggccc

SEQ ID NO: 10777 - DNA, 26 bp, Homo sapiens
atagctggaagctgggtcagggccca

SEQ ID NO: 10778 - DNA, 26 bp, Homo sapiens
tagctggaagctgggtcagggcccag

SEQ ID NO: 10779 - DNA, 26 bp, Homo sapiens
agctggaagctgggtcagggcccagg

SEQ ID NO: 10780 - DNA, 26 bp, Homo sapiens
gctggaagctgggtcagggcccaggg

SEQ ID NO: 10781 - DNA, 26 bp, Homo sapiens
ctggaagctgggtcagggcccagggc

SEQ ID NO: 10782 - DNA, 26 bp, Homo sapiens
tggaagctgggtcagggcccagggcc

SEQ ID NO: 10783 - DNA, 26 bp, Homo sapiens
ggaagctgggtcagggcccagggccc

SEQ ID NO: 10784 - DNA, 26 bp, Homo sapiens
gaagctgggtcagggcccagggcccc

SEQ ID NO: 10785 - DNA, 26 bp, Homo sapiens
aagctgggtcagggcccagggcccca

SEQ ID NO: 10786 - DNA, 26 bp, Homo sapiens
agctgggtcagggcccagggccccag

SEQ ID NO: 10787 - DNA, 26 bp, Homo sapiens
gctgggtcagggcccagggccccagc

SEQ ID NO: 10788 - DNA, 26 bp, Homo sapiens
ctgggtcagggcccagggccccagcg

SEQ ID NO: 10789 - DNA, 26 bp, Homo sapiens
tgggtcagggcccagggccccagcgc

SEQ ID NO: 10790 - DNA, 26 bp, Homo sapiens
gggtcagggcccagggccccagcgcc

SEQ ID NO: 10791 - DNA, 26 bp, Homo sapiens
ggtcagggcccagggccccagcgccc

SEQ ID NO: 10792 - DNA, 26 bp, Homo sapiens
gtcagggcccagggccccagcgcccg

SEQ ID NO: 10793 - DNA, 26 bp, Homo sapiens
tcagggcccagggccccagcgcccgc

SEQ ID NO: 10794 - DNA, 26 bp, Homo sapiens
cagggcccagggccccagcgcccgct

SEQ ID NO: 10795 - DNA, 26 bp, Homo sapiens
agggcccagggccccagcgcccgctc

SEQ ID NO: 10796 - DNA, 26 bp, Homo sapiens
gggcccagggccccagcgcccgctcc

SEQ ID NO: 10797 - DNA, 26 bp, Homo sapiens
ggcccagggccccagcgcccgctccc

SEQ ID NO: 10798 - DNA, 26 bp, Homo sapiens
gcccagggccccagcgcccgctccca

SEQ ID NO: 10799 - DNA, 26 bp, Homo sapiens
cccagggccccagcgcccgctcccac

SEQ ID NO: 10800 - DNA, 26 bp, Homo sapiens
ccagggccccagcgcccgctcccact

SEQ ID NO: 10801 - DNA, 26 bp, Homo sapiens
cagggccccagcgcccgctcccactc

SEQ ID NO: 10802 - DNA, 26 bp, Homo sapiens
agggccccagcgcccgctcccactcc

SEQ ID NO: 10803 - DNA, 26 bp, Homo sapiens
gggccccagcgcccgctcccactccc

SEQ ID NO: 10804 - DNA, 26 bp, Homo sapiens
ggccccagcgcccgctcccactcccg

SEQ ID NO: 10805 - DNA, 26 bp, Homo sapiens
gccccagcgcccgctcccactcccgg

SEQ ID NO: 10806 - DNA, 26 bp, Homo sapiens
ccccagcgcccgctcccactcccggg

SEQ ID NO: 10807 - DNA, 26 bp, Homo sapiens
cccagcgcccgctcccactcccgggg

SEQ ID NO: 10808 - DNA, 26 bp, Homo sapiens
ccagcgcccgctcccactcccggggc

SEQ ID NO: 10809 - DNA, 26 bp, Homo sapiens
cagcgcccgctcccactcccggggct

SEQ ID NO: 10810 - DNA, 26 bp, Homo sapiens
agcgcccgctcccactcccggggctg

SEQ ID NO: 10811 - DNA, 26 bp, Homo sapiens
gcgcccgctcccactcccggggctgt

SEQ ID NO: 10812 - DNA, 26 bp, Homo sapiens
cgcccgctcccactcccggggctgtg

SEQ ID NO: 10813 - DNA, 26 bp, Homo sapiens
gcccgctcccactcccggggctgtgc

SEQ ID NO: 10814 - DNA, 26 bp, Homo sapiens
cccgctcccactcccggggctgtgcc

SEQ ID NO: 10815 - DNA, 26 bp, Homo sapiens
ccgctcccactcccggggctgtgccc

SEQ ID NO: 10816 - DNA, 26 bp, Homo sapiens
cgctcccactcccggggctgtgcccc

SEQ ID NO: 10817 - DNA, 26 bp, Homo sapiens
gctcccactcccggggctgtgcccct

SEQ ID NO: 10818 - DNA, 26 bp, Homo sapiens
ctcccactcccggggctgtgcccctg

SEQ ID NO: 10819 - DNA, 26 bp, Homo sapiens
tcccactcccggggctgtgcccctgc

SEQ ID NO: 10820 - DNA, 26 bp, Homo sapiens
cccactcccggggctgtgcccctgcc

SEQ ID NO: 10821 - DNA, 26 bp, Homo sapiens
ccactcccggggctgtgcccctgcca

SEQ ID NO: 10822 - DNA, 26 bp, Homo sapiens
cactcccggggctgtgcccctgccag

SEQ ID NO: 10823 - DNA, 26 bp, Homo sapiens
actcccggggctgtgcccctgccagg

SEQ ID NO: 10824 - DNA, 26 bp, Homo sapiens
ctcccggggctgtgcccctgccaggt

SEQ ID NO: 10825 - DNA, 26 bp, Homo sapiens
tcccggggctgtgcccctgccaggtg

SEQ ID NO: 10826 - DNA, 26 bp, Homo sapiens
cccggggctgtgcccctgccaggtgg

SEQ ID NO: 10827 - DNA, 26 bp, Homo sapiens
ccggggctgtgcccctgccaggtggg

SEQ ID NO: 10828 - DNA, 26 bp, Homo sapiens
cggggctgtgcccctgccaggtgggc

SEQ ID NO: 10829 - DNA, 26 bp, Homo sapiens
ggggctgtgcccctgccaggtgggcc

SEQ ID NO: 10830 - DNA, 26 bp, Homo sapiens
gggctgtgcccctgccaggtgggcca

SEQ ID NO: 10831 - DNA, 26 bp, Homo sapiens
ggctgtgcccctgccaggtgggccac

SEQ ID NO: 10832 - DNA, 26 bp, Homo sapiens
gctgtgcccctgccaggtgggccaca

SEQ ID NO: 10833 - DNA, 26 bp, Homo sapiens
ctgtgcccctgccaggtgggccacat

SEQ ID NO: 10834 - DNA, 26 bp, Homo sapiens
tgtgcccctgccaggtgggccacata

SEQ ID NO: 10835 - DNA, 26 bp, Homo sapiens
gtgcccctgccaggtgggccacatag

SEQ ID NO: 10836 - DNA, 26 bp, Homo sapiens
tgcccctgccaggtgggccacatagg

SEQ ID NO: 10837 - DNA, 26 bp, Homo sapiens
gcccctgccaggtgggccacataggg

SEQ ID NO: 10838 - DNA, 26 bp, Homo sapiens
cccctgccaggtgggccacatagggc

SEQ ID NO: 10839 - DNA, 26 bp, Homo sapiens
ccctgccaggtgggccacatagggcc

SEQ ID NO: 10840 - DNA, 26 bp, Homo sapiens
cctgccaggtgggccacatagggcct

SEQ ID NO: 10841 - DNA, 26 bp, Homo sapiens
ctgccaggtgggccacatagggcctt

SEQ ID NO: 10842 - DNA, 26 bp, Homo sapiens
tgccaggtgggccacatagggccttg

SEQ ID NO: 10843 - DNA, 26 bp, Homo sapiens
gccaggtgggccacatagggccttga

SEQ ID NO: 10844 - DNA, 26 bp, Homo sapiens
ccaggtgggccacatagggccttgat

SEQ ID NO: 10845 - DNA, 26 bp, Homo sapiens
caggtgggccacatagggccttgatg

SEQ ID NO: 10846 - DNA, 26 bp, Homo sapiens
aggtgggccacatagggccttgatgg

SEQ ID NO: 10847 - DNA, 26 bp, Homo sapiens
ggtgggccacatagggccttgatgga

SEQ ID NO: 10848 - DNA, 26 bp, Homo sapiens
gtgggccacatagggccttgatggag

SEQ ID NO: 10849 - DNA, 26 bp, Homo sapiens
tgggccacatagggccttgatggagt

SEQ ID NO: 10850 - DNA, 26 bp, Homo sapiens
gggccacatagggccttgatggagtg

SEQ ID NO: 10851 - DNA, 26 bp, Homo sapiens
ggccacatagggccttgatggagtgg

SEQ ID NO: 10852 - DNA, 26 bp, Homo sapiens
gccacatagggccttgatggagtggg

SEQ ID NO: 10853 - DNA, 26 bp, Homo sapiens
ccacatagggccttgatggagtgggc

SEQ ID NO: 10854 - DNA, 26 bp, Homo sapiens
cacatagggccttgatggagtgggca

SEQ ID NO: 10855 - DNA, 26 bp, Homo sapiens
acatagggccttgatggagtgggcag

SEQ ID NO: 10856 - DNA, 26 bp, Homo sapiens
catagggccttgatggagtgggcagg

SEQ ID NO: 10857 - DNA, 26 bp, Homo sapiens
atagggccttgatggagtgggcaggg

SEQ ID NO: 10858 - DNA, 26 bp, Homo sapiens
tagggccttgatggagtgggcagggc

SEQ ID NO: 10859 - DNA, 26 bp, Homo sapiens
agggccttgatggagtgggcagggca

SEQ ID NO: 10860 - DNA, 26 bp, Homo sapiens
gggccttgatggagtgggcagggcac

SEQ ID NO: 10861 - DNA, 26 bp, Homo sapiens
ggccttgatggagtgggcagggcact

SEQ ID NO: 10862 - DNA, 26 bp, Homo sapiens
gccttgatggagtgggcagggcactg

SEQ ID NO: 10863 - DNA, 26 bp, Homo sapiens
ccttgatggagtgggcagggcactgg

SEQ ID NO: 10864 - DNA, 26 bp, Homo sapiens
cttgatggagtgggcagggcactggg

SEQ ID NO: 10865 - DNA, 26 bp, Homo sapiens
ttgatggagtgggcagggcactgggg

SEQ ID NO: 10866 - DNA, 26 bp, Homo sapiens
tgatggagtgggcagggcactggggg

SEQ ID NO: 10867 - DNA, 26 bp, Homo sapiens
gatggagtgggcagggcactgggggg

SEQ ID NO: 10868 - DNA, 26 bp, Homo sapiens
atggagtgggcagggcactggggggc

SEQ ID NO: 10869 - DNA, 26 bp, Homo sapiens
tggagtgggcagggcactggggggcc

SEQ ID NO: 10870 - DNA, 26 bp, Homo sapiens
ggagtgggcagggcactggggggccc

SEQ ID NO: 10871 - DNA, 26 bp, Homo sapiens
gagtgggcagggcactggggggccca

SEQ ID NO: 10872 - DNA, 26 bp, Homo sapiens
agtgggcagggcactggggggcccag

SEQ ID NO: 10873 - DNA, 26 bp, Homo sapiens
gtgggcagggcactggggggcccaga

SEQ ID NO: 10874 - DNA, 26 bp, Homo sapiens
tgggcagggcactggggggcccagag

SEQ ID NO: 10875 - DNA, 26 bp, Homo sapiens
gggcagggcactggggggcccagagg

SEQ ID NO: 10876 - DNA, 26 bp, Homo sapiens
ggcagggcactggggggcccagaggc

SEQ ID NO: 10877 - DNA, 26 bp, Homo sapiens
gcagggcactggggggcccagaggcc

SEQ ID NO: 10878 - DNA, 26 bp, Homo sapiens
cagggcactggggggcccagaggccg

SEQ ID NO: 10879 - DNA, 26 bp, Homo sapiens
agggcactggggggcccagaggccgc

SEQ ID NO: 10880 - DNA, 26 bp, Homo sapiens
gggcactggggggcccagaggccgcg

SEQ ID NO: 10881 - DNA, 26 bp, Homo sapiens
ggcactggggggcccagaggccgcgg

SEQ ID NO: 10882 - DNA, 26 bp, Homo sapiens
gcactggggggcccagaggccgcggg

SEQ ID NO: 10883 - DNA, 26 bp, Homo sapiens
cactggggggcccagaggccgcggga

SEQ ID NO: 10884 - DNA, 26 bp, Homo sapiens
actggggggcccagaggccgcgggac

SEQ ID NO: 10885 - DNA, 26 bp, Homo sapiens
ctggggggcccagaggccgcgggacg

SEQ ID NO: 10886 - DNA, 26 bp, Homo sapiens
tggggggcccagaggccgcgggacgg

SEQ ID NO: 10887 - DNA, 26 bp, Homo sapiens
ggggggcccagaggccgcgggacggc

SEQ ID NO: 10888 - DNA, 26 bp, Homo sapiens
gggggcccagaggccgcgggacggcc

SEQ ID NO: 10889 - DNA, 26 bp, Homo sapiens
ggggcccagaggccgcgggacggccg

SEQ ID NO: 10890 - DNA, 26 bp, Homo sapiens
gggcccagaggccgcgggacggccgc

SEQ ID NO: 10891 - DNA, 26 bp, Homo sapiens
ggcccagaggccgcgggacggccgct

SEQ ID NO: 10892 - DNA, 26 bp, Homo sapiens
gcccagaggccgcgggacggccgctg

SEQ ID NO: 10893 - DNA, 26 bp, Homo sapiens
cccagaggccgcgggacggccgctgc

SEQ ID NO: 10894 - DNA, 26 bp, Homo sapiens
ccagaggccgcgggacggccgctgct

SEQ ID NO: 10895 - DNA, 26 bp, Homo sapiens
cagaggccgcgggacggccgctgctg

SEQ ID NO: 10896 - DNA, 26 bp, Homo sapiens
agaggccgcgggacggccgctgctgc

SEQ ID NO: 10897 - DNA, 26 bp, Homo sapiens
gaggccgcgggacggccgctgctgct

SEQ ID NO: 10898 - DNA, 26 bp, Homo sapiens
aggccgcgggacggccgctgctgctg

SEQ ID NO: 10899 - DNA, 26 bp, Homo sapiens
ggccgcgggacggccgctgctgctgc

SEQ ID NO: 10900 - DNA, 26 bp, Homo sapiens
gccgcgggacggccgctgctgctgcc

SEQ ID NO: 10901 - DNA, 26 bp, Homo sapiens
ccgcgggacggccgctgctgctgccc

SEQ ID NO: 10902 - DNA, 26 bp, Homo sapiens
cgcgggacggccgctgctgctgccct

SEQ ID NO: 10903 - DNA, 26 bp, Homo sapiens
gcgggacggccgctgctgctgccctc

SEQ ID NO: 10904 - DNA, 26 bp, Homo sapiens
cgggacggccgctgctgctgccctct

SEQ ID NO: 10905 - DNA, 26 bp, Homo sapiens
gggacggccgctgctgctgccctctg

SEQ ID NO: 10906 - DNA, 26 bp, Homo sapiens
ggacggccgctgctgctgccctctgt

SEQ ID NO: 10907 - DNA, 26 bp, Homo sapiens
gacggccgctgctgctgccctctgtg

SEQ ID NO: 10908 - DNA, 26 bp, Homo sapiens
acggccgctgctgctgccctctgtgc

SEQ ID NO: 10909 - DNA, 26 bp, Homo sapiens
cggccgctgctgctgccctctgtgcg

SEQ ID NO: 10910 - DNA, 26 bp, Homo sapiens
ggccgctgctgctgccctctgtgcga

SEQ ID NO: 10911 - DNA, 26 bp, Homo sapiens
gccgctgctgctgccctctgtgcgac

SEQ ID NO: 10912 - DNA, 26 bp, Homo sapiens
ccgctgctgctgccctctgtgcgacc

SEQ ID NO: 10913 - DNA, 26 bp, Homo sapiens
cgctgctgctgccctctgtgcgacct

SEQ ID NO: 10914 - DNA, 26 bp, Homo sapiens
gctgctgctgccctctgtgcgacctg

SEQ ID NO: 10915 - DNA, 26 bp, Homo sapiens
ctgctgctgccctctgtgcgacctgg

SEQ ID NO: 10916 - DNA, 26 bp, Homo sapiens
tgctgctgccctctgtgcgacctggc

SEQ ID NO: 10917 - DNA, 26 bp, Homo sapiens
gctgctgccctctgtgcgacctggca

SEQ ID NO: 10918 - DNA, 26 bp, Homo sapiens
ctgctgccctctgtgcgacctggcat

SEQ ID NO: 10919 - DNA, 26 bp, Homo sapiens
tgctgccctctgtgcgacctggcatc

SEQ ID NO: 10920 - DNA, 26 bp, Homo sapiens
gctgccctctgtgcgacctggcatct

SEQ ID NO: 10921 - DNA, 26 bp, Homo sapiens
ctgccctctgtgcgacctggcatctc

SEQ ID NO: 10922 - DNA, 26 bp, Homo sapiens
tgccctctgtgcgacctggcatctca

SEQ ID NO: 10923 - DNA, 26 bp, Homo sapiens
gccctctgtgcgacctggcatctcac

SEQ ID NO: 10924 - DNA, 26 bp, Homo sapiens
ccctctgtgcgacctggcatctcacg

SEQ ID NO: 10925 - DNA, 26 bp, Homo sapiens
cctctgtgcgacctggcatctcacgc

SEQ ID NO: 10926 - DNA, 26 bp, Homo sapiens
ctctgtgcgacctggcatctcacgct

SEQ ID NO: 10927 - DNA, 26 bp, Homo sapiens
tctgtgcgacctggcatctcacgctc

SEQ ID NO: 10928 - DNA, 26 bp, Homo sapiens
ctgtgcgacctggcatctcacgctcc

SEQ ID NO: 10929 - DNA, 26 bp, Homo sapiens
tgtgcgacctggcatctcacgctcct

SEQ ID NO: 10930 - DNA, 26 bp, Homo sapiens
gtgcgacctggcatctcacgctcctg

SEQ ID NO: 10931 - DNA, 26 bp, Homo sapiens
tgcgacctggcatctcacgctcctga

SEQ ID NO: 10932 - DNA, 26 bp, Homo sapiens
gcgacctggcatctcacgctcctgag

SEQ ID NO: 10933 - DNA, 26 bp, Homo sapiens
cgacctggcatctcacgctcctgagg

SEQ ID NO: 10934 - DNA, 26 bp, Homo sapiens
gacctggcatctcacgctcctgaggt

SEQ ID NO: 10935 - DNA, 26 bp, Homo sapiens
acctggcatctcacgctcctgaggtg

SEQ ID NO: 10936 - DNA, 26 bp, Homo sapiens
cctggcatctcacgctcctgaggtgg

SEQ ID NO: 10937 - DNA, 26 bp, Homo sapiens
ctggcatctcacgctcctgaggtggg

SEQ ID NO: 10938 - DNA, 26 bp, Homo sapiens
tggcatctcacgctcctgaggtgggg

SEQ ID NO: 10939 - DNA, 26 bp, Homo sapiens
ggcatctcacgctcctgaggtgggga

SEQ ID NO: 10940 - DNA, 26 bp, Homo sapiens
gcatctcacgctcctgaggtggggaa

SEQ ID NO: 10941 - DNA, 26 bp, Homo sapiens
catctcacgctcctgaggtggggaag

SEQ ID NO: 10942 - DNA, 26 bp, Homo sapiens
atctcacgctcctgaggtggggaagg

SEQ ID NO: 10943 - DNA, 26 bp, Homo sapiens
tctcacgctcctgaggtggggaaggg

SEQ ID NO: 10944 - DNA, 26 bp, Homo sapiens
ctcacgctcctgaggtggggaagggg

SEQ ID NO: 10945 - DNA, 26 bp, Homo sapiens
tcacgctcctgaggtggggaaggggc

SEQ ID NO: 10946 - DNA, 26 bp, Homo sapiens
cacgctcctgaggtggggaaggggcg

SEQ ID NO: 10947 - DNA, 26 bp, Homo sapiens
acgctcctgaggtggggaaggggcgc

SEQ ID NO: 10948 - DNA, 26 bp, Homo sapiens
cgctcctgaggtggggaaggggcgct

SEQ ID NO: 10949 - DNA, 26 bp, Homo sapiens
gctcctgaggtggggaaggggcgctg

SEQ ID NO: 10950 - DNA, 26 bp, Homo sapiens
ctcctgaggtggggaaggggcgctgg

SEQ ID NO: 10951 - DNA, 26 bp, Homo sapiens
tcctgaggtggggaaggggcgctggc

SEQ ID NO: 10952 - DNA, 26 bp, Homo sapiens
cctgaggtggggaaggggcgctggca

SEQ ID NO: 10953 - DNA, 26 bp, Homo sapiens
ctgaggtggggaaggggcgctggcac

SEQ ID NO: 10954 - DNA, 26 bp, Homo sapiens
tgaggtggggaaggggcgctggcacc

SEQ ID NO: 10955 - DNA, 26 bp, Homo sapiens
gaggtggggaaggggcgctggcaccc

SEQ ID NO: 10956 - DNA, 26 bp, Homo sapiens
aggtggggaaggggcgctggcaccca

SEQ ID NO: 10957 - DNA, 26 bp, Homo sapiens
ggtggggaaggggcgctggcacccac

SEQ ID NO: 10958 - DNA, 26 bp, Homo sapiens
gtggggaaggggcgctggcacccaca

SEQ ID NO: 10959 - DNA, 26 bp, Homo sapiens
tggggaaggggcgctggcacccacag

SEQ ID NO: 10960 - DNA, 26 bp, Homo sapiens
ggggaaggggcgctggcacccacagc

SEQ ID NO: 10961 - DNA, 26 bp, Homo sapiens
gggaaggggcgctggcacccacagca

SEQ ID NO: 10962 - DNA, 26 bp, Homo sapiens
ggaaggggcgctggcacccacagcag

SEQ ID NO: 10963 - DNA, 26 bp, Homo sapiens
gaaggggcgctggcacccacagcagg

SEQ ID NO: 10964 - DNA, 26 bp, Homo sapiens
aaggggcgctggcacccacagcaggt

SEQ ID NO: 10965 - DNA, 26 bp, Homo sapiens
aggggcgctggcacccacagcaggta

SEQ ID NO: 10966 - DNA, 26 bp, Homo sapiens
ggggcgctggcacccacagcaggtac

SEQ ID NO: 10967 - DNA, 26 bp, Homo sapiens
gggcgctggcacccacagcaggtacc

SEQ ID NO: 10968 - DNA, 26 bp, Homo sapiens
ggcgctggcacccacagcaggtacca

SEQ ID NO: 10969 - DNA, 26 bp, Homo sapiens
gcgctggcacccacagcaggtaccac

SEQ ID NO: 10970 - DNA, 26 bp, Homo sapiens
cgctggcacccacagcaggtaccacg

SEQ ID NO: 10971 - DNA, 26 bp, Homo sapiens
gctggcacccacagcaggtaccacgc

SEQ ID NO: 10972 - DNA, 26 bp, Homo sapiens
ctggcacccacagcaggtaccacgcc

SEQ ID NO: 10973 - DNA, 26 bp, Homo sapiens
tggcacccacagcaggtaccacgccc

SEQ ID NO: 10974 - DNA, 26 bp, Homo sapiens
ggcacccacagcaggtaccacgccca

SEQ ID NO: 10975 - DNA, 26 bp, Homo sapiens
gcacccacagcaggtaccacgcccac

SEQ ID NO: 10976 - DNA, 26 bp, Homo sapiens
cacccacagcaggtaccacgcccact

SEQ ID NO: 10977 - DNA, 26 bp, Homo sapiens
acccacagcaggtaccacgcccactc

SEQ ID NO: 10978 - DNA, 26 bp, Homo sapiens
cccacagcaggtaccacgcccactca

SEQ ID NO: 10979 - DNA, 26 bp, Homo sapiens
ccacagcaggtaccacgcccactcag

SEQ ID NO: 10980 - DNA, 26 bp, Homo sapiens
cacagcaggtaccacgcccactcagg

SEQ ID NO: 10981 - DNA, 26 bp, Homo sapiens
acagcaggtaccacgcccactcaggc

SEQ ID NO: 10982 - DNA, 26 bp, Homo sapiens
cagcaggtaccacgcccactcaggca

SEQ ID NO: 10983 - DNA, 26 bp, Homo sapiens
agcaggtaccacgcccactcaggcag

SEQ ID NO: 10984 - DNA, 26 bp, Homo sapiens
gcaggtaccacgcccactcaggcagc

SEQ ID NO: 10985 - DNA, 26 bp, Homo sapiens
caggtaccacgcccactcaggcagct

SEQ ID NO: 10986 - DNA, 26 bp, Homo sapiens
aggtaccacgcccactcaggcagctc

SEQ ID NO: 10987 - DNA, 26 bp, Homo sapiens
ggtaccacgcccactcaggcagctca

SEQ ID NO: 10988 - DNA, 26 bp, Homo sapiens
gtaccacgcccactcaggcagctcaa

SEQ ID NO: 10989 - DNA, 26 bp, Homo sapiens
taccacgcccactcaggcagctcaat

SEQ ID NO: 10990 - DNA, 26 bp, Homo sapiens
accacgcccactcaggcagctcaata

SEQ ID NO: 10991 - DNA, 26 bp, Homo sapiens
ccacgcccactcaggcagctcaatac

SEQ ID NO: 10992 - DNA, 26 bp, Homo sapiens
cacgcccactcaggcagctcaatact

SEQ ID NO: 10993 - DNA, 26 bp, Homo sapiens
acgcccactcaggcagctcaatactg

SEQ ID NO: 10994 - DNA, 26 bp, Homo sapiens
cgcccactcaggcagctcaatactgc

SEQ ID NO: 10995 - DNA, 26 bp, Homo sapiens
gcccactcaggcagctcaatactgcg

SEQ ID NO: 10996 - DNA, 26 bp, Homo sapiens
cccactcaggcagctcaatactgcgt

SEQ ID NO: 10997 - DNA, 26 bp, Homo sapiens
ccactcaggcagctcaatactgcgtg

SEQ ID NO: 10998 - DNA, 26 bp, Homo sapiens
cactcaggcagctcaatactgcgtgt

SEQ ID NO: 10999 - DNA, 26 bp, Homo sapiens
actcaggcagctcaatactgcgtgtg

SEQ ID NO: 11000 - DNA, 26 bp, Homo sapiens
ctcaggcagctcaatactgcgtgtgg

SEQ ID NO: 11001 - DNA, 26 bp, Homo sapiens
tcaggcagctcaatactgcgtgtggt

SEQ ID NO: 11002 - DNA, 26 bp, Homo sapiens
caggcagctcaatactgcgtgtggtc

SEQ ID NO: 11003 - DNA, 26 bp, Homo sapiens
aggcagctcaatactgcgtgtggtct

SEQ ID NO: 11004 - DNA, 26 bp, Homo sapiens
ggcagctcaatactgcgtgtggtctc

SEQ ID NO: 11005 - DNA, 26 bp, Homo sapiens
gcagctcaatactgcgtgtggtctct

SEQ ID NO: 11006 - DNA, 26 bp, Homo sapiens
cagctcaatactgcgtgtggtctctc

SEQ ID NO: 11007 - DNA, 26 bp, Homo sapiens
agctcaatactgcgtgtggtctctct

SEQ ID NO: 11008 - DNA, 26 bp, Homo sapiens
gctcaatactgcgtgtggtctctctc

SEQ ID NO: 11009 - DNA, 26 bp, Homo sapiens
ctcaatactgcgtgtggtctctctcc

SEQ ID NO: 11010 - DNA, 26 bp, Homo sapiens
tcaatactgcgtgtggtctctctccc

SEQ ID NO: 11011 - DNA, 26 bp, Homo sapiens
caatactgcgtgtggtctctctcccc

SEQ ID NO: 11012 - DNA, 26 bp, Homo sapiens
aatactgcgtgtggtctctctccccg

SEQ ID NO: 11013 - DNA, 26 bp, Homo sapiens
atactgcgtgtggtctctctccccgt

SEQ ID NO: 11014 - DNA, 26 bp, Homo sapiens
tactgcgtgtggtctctctccccgtg

SEQ ID NO: 11015 - DNA, 26 bp, Homo sapiens
actgcgtgtggtctctctccccgtga

SEQ ID NO: 11016 - DNA, 26 bp, Homo sapiens
ctgcgtgtggtctctctccccgtgag

SEQ ID NO: 11017 - DNA, 26 bp, Homo sapiens
tgcgtgtggtctctctccccgtgagg

SEQ ID NO: 11018 - DNA, 26 bp, Homo sapiens
gcgtgtggtctctctccccgtgaggg

SEQ ID NO: 11019 - DNA, 26 bp, Homo sapiens
cgtgtggtctctctccccgtgaggga

SEQ ID NO: 11020 - DNA, 26 bp, Homo sapiens
gtgtggtctctctccccgtgagggag

SEQ ID NO: 11021 - DNA, 26 bp, Homo sapiens
tgtggtctctctccccgtgagggagt

SEQ ID NO: 11022 - DNA, 26 bp, Homo sapiens
gtggtctctctccccgtgagggagtg

SEQ ID NO: 11023 - DNA, 26 bp, Homo sapiens
tggtctctctccccgtgagggagtga

SEQ ID NO: 11024 - DNA, 26 bp, Homo sapiens
ggtctctctccccgtgagggagtgag

SEQ ID NO: 11025 - DNA, 26 bp, Homo sapiens
gtctctctccccgtgagggagtgagt

SEQ ID NO: 11026 - DNA, 26 bp, Homo sapiens
tctctctccccgtgagggagtgagtt

SEQ ID NO: 11027 - DNA, 26 bp, Homo sapiens
ctctctccccgtgagggagtgagttc

SEQ ID NO: 11028 - DNA, 26 bp, Homo sapiens
tctctccccgtgagggagtgagttca

SEQ ID NO: 11029 - DNA, 26 bp, Homo sapiens
ctctccccgtgagggagtgagttcaa

SEQ ID NO: 11030 - DNA, 26 bp, Homo sapiens
tctccccgtgagggagtgagttcaag

SEQ ID NO: 11031 - DNA, 26 bp, Homo sapiens
ctccccgtgagggagtgagttcaagt

SEQ ID NO: 11032 - DNA, 26 bp, Homo sapiens
tccccgtgagggagtgagttcaagta

SEQ ID NO: 11033 - DNA, 26 bp, Homo sapiens
ccccgtgagggagtgagttcaagtac

SEQ ID NO: 11034 - DNA, 26 bp, Homo sapiens
cccgtgagggagtgagttcaagtacg

SEQ ID NO: 11035 - DNA, 26 bp, Homo sapiens
ccgtgagggagtgagttcaagtacga

SEQ ID NO: 11036 - DNA, 26 bp, Homo sapiens
cgtgagggagtgagttcaagtacgag

SEQ ID NO: 11037 - DNA, 26 bp, Homo sapiens
gtgagggagtgagttcaagtacgaga

SEQ ID NO: 11038 - DNA, 26 bp, Homo sapiens
tgagggagtgagttcaagtacgagag

SEQ ID NO: 11039 - DNA, 26 bp, Homo sapiens
gagggagtgagttcaagtacgagagg

SEQ ID NO: 11040 - DNA, 26 bp, Homo sapiens
agggagtgagttcaagtacgagagga

SEQ ID NO: 11041 - DNA, 26 bp, Homo sapiens
gggagtgagttcaagtacgagaggag

SEQ ID NO: 11042 - DNA, 26 bp, Homo sapiens
ggagtgagttcaagtacgagaggagt

SEQ ID NO: 11043 - DNA, 26 bp, Homo sapiens
gagtgagttcaagtacgagaggagtc

SEQ ID NO: 11044 - DNA, 26 bp, Homo sapiens
agtgagttcaagtacgagaggagtcc

SEQ ID NO: 11045 - DNA, 26 bp, Homo sapiens
gtgagttcaagtacgagaggagtccg

SEQ ID NO: 11046 - DNA, 26 bp, Homo sapiens
tgagttcaagtacgagaggagtccgg

SEQ ID NO: 11047 - DNA, 26 bp, Homo sapiens
gagttcaagtacgagaggagtccgga

SEQ ID NO: 11048 - DNA, 26 bp, Homo sapiens
agttcaagtacgagaggagtccggag

SEQ ID NO: 11049 - DNA, 26 bp, Homo sapiens
gttcaagtacgagaggagtccggagg

SEQ ID NO: 11050 - DNA, 26 bp, Homo sapiens
ttcaagtacgagaggagtccggaggc

SEQ ID NO: 11051 - DNA, 26 bp, Homo sapiens
tcaagtacgagaggagtccggaggcc

SEQ ID NO: 11052 - DNA, 26 bp, Homo sapiens
caagtacgagaggagtccggaggcct

SEQ ID NO: 11053 - DNA, 26 bp, Homo sapiens
aagtacgagaggagtccggaggcctc

SEQ ID NO: 11054 - DNA, 26 bp, Homo sapiens
agtacgagaggagtccggaggcctca

SEQ ID NO: 11055 - DNA, 26 bp, Homo sapiens
gtacgagaggagtccggaggcctcag

SEQ ID NO: 11056 - DNA, 26 bp, Homo sapiens
tacgagaggagtccggaggcctcaga

SEQ ID NO: 11057 - DNA, 26 bp, Homo sapiens
acgagaggagtccggaggcctcagag

SEQ ID NO: 11058 - DNA, 26 bp, Homo sapiens
cgagaggagtccggaggcctcagagg

SEQ ID NO: 11059 - DNA, 26 bp, Homo sapiens
gagaggagtccggaggcctcagaggg

SEQ ID NO: 11060 - DNA, 26 bp, Homo sapiens
agaggagtccggaggcctcagagggc

SEQ ID NO: 11061 - DNA, 26 bp, Homo sapiens
gaggagtccggaggcctcagagggca

SEQ ID NO: 11062 - DNA, 26 bp, Homo sapiens
aggagtccggaggcctcagagggcag

SEQ ID NO: 11063 - DNA, 26 bp, Homo sapiens
ggagtccggaggcctcagagggcagt

SEQ ID NO: 11064 - DNA, 26 bp, Homo sapiens
gagtccggaggcctcagagggcagtc

SEQ ID NO: 11065 - DNA, 26 bp, Homo sapiens
agtccggaggcctcagagggcagtcg

SEQ ID NO: 11066 - DNA, 26 bp, Homo sapiens
gtccggaggcctcagagggcagtcgg

SEQ ID NO: 11067 - DNA, 26 bp, Homo sapiens
tccggaggcctcagagggcagtcgga

SEQ ID NO: 11068 - DNA, 26 bp, Homo sapiens
ccggaggcctcagagggcagtcggag

SEQ ID NO: 11069 - DNA, 26 bp, Homo sapiens
cggaggcctcagagggcagtcggagc

SEQ ID NO: 11070 - DNA, 26 bp, Homo sapiens
ggaggcctcagagggcagtcggagcg

SEQ ID NO: 11071 - DNA, 26 bp, Homo sapiens
gaggcctcagagggcagtcggagcgc

SEQ ID NO: 11072 - DNA, 26 bp, Homo sapiens
aggcctcagagggcagtcggagcgcc

SEQ ID NO: 11073 - DNA, 26 bp, Homo sapiens
ggcctcagagggcagtcggagcgcca

SEQ ID NO: 11074 - DNA, 26 bp, Homo sapiens
gcctcagagggcagtcggagcgccag

SEQ ID NO: 11075 - DNA, 26 bp, Homo sapiens
cctcagagggcagtcggagcgccagg

SEQ ID NO: 11076 - DNA, 26 bp, Homo sapiens
ctcagagggcagtcggagcgccaggc

SEQ ID NO: 11077 - DNA, 26 bp, Homo sapiens
tcagagggcagtcggagcgccaggcc

SEQ ID NO: 11078 - DNA, 26 bp, Homo sapiens
cagagggcagtcggagcgccaggccg

SEQ ID NO: 11079 - DNA, 26 bp, Homo sapiens
agagggcagtcggagcgccaggccgc

SEQ ID NO: 11080 - DNA, 26 bp, Homo sapiens
gagggcagtcggagcgccaggccgcg

SEQ ID NO: 11081 - DNA, 26 bp, Homo sapiens
agggcagtcggagcgccaggccgcgg

SEQ ID NO: 11082 - DNA, 26 bp, Homo sapiens
gggcagtcggagcgccaggccgcggg

SEQ ID NO: 11083 - DNA, 26 bp, Homo sapiens
ggcagtcggagcgccaggccgcgggg

SEQ ID NO: 11084 - DNA, 26 bp, Homo sapiens
gcagtcggagcgccaggccgcggggc

SEQ ID NO: 11085 - DNA, 26 bp, Homo sapiens
cagtcggagcgccaggccgcggggct

SEQ ID NO: 11086 - DNA, 26 bp, Homo sapiens
agtcggagcgccaggccgcggggctg

SEQ ID NO: 11087 - DNA, 26 bp, Homo sapiens
gtcggagcgccaggccgcggggctgg

SEQ ID NO: 11088 - DNA, 26 bp, Homo sapiens
tcggagcgccaggccgcggggctggc

SEQ ID NO: 11089 - DNA, 26 bp, Homo sapiens
cggagcgccaggccgcggggctggcc

SEQ ID NO: 11090 - DNA, 26 bp, Homo sapiens
ggagcgccaggccgcggggctggccg

SEQ ID NO: 11091 - DNA, 26 bp, Homo sapiens
gagcgccaggccgcggggctggccgt

SEQ ID NO: 11092 - DNA, 26 bp, Homo sapiens
agcgccaggccgcggggctggccgtg

SEQ ID NO: 11093 - DNA, 26 bp, Homo sapiens
gcgccaggccgcggggctggccgtgt

SEQ ID NO: 11094 - DNA, 26 bp, Homo sapiens
cgccaggccgcggggctggccgtgtg

SEQ ID NO: 11095 - DNA, 26 bp, Homo sapiens
gccaggccgcggggctggccgtgtgc

SEQ ID NO: 11096 - DNA, 26 bp, Homo sapiens
ccaggccgcggggctggccgtgtgct

SEQ ID NO: 11097 - DNA, 26 bp, Homo sapiens
caggccgcggggctggccgtgtgctg

SEQ ID NO: 11098 - DNA, 26 bp, Homo sapiens
aggccgcggggctggccgtgtgctgc

SEQ ID NO: 11099 - DNA, 26 bp, Homo sapiens
ggccgcggggctggccgtgtgctgcc

SEQ ID NO: 11100 - DNA, 26 bp, Homo sapiens
gccgcggggctggccgtgtgctgccc

SEQ ID NO: 11101 - DNA, 26 bp, Homo sapiens
ccgcggggctggccgtgtgctgccct

SEQ ID NO: 11102 - DNA, 26 bp, Homo sapiens
cgcggggctggccgtgtgctgccctg

SEQ ID NO: 11103 - DNA, 26 bp, Homo sapiens
gcggggctggccgtgtgctgccctgc

SEQ ID NO: 11104 - DNA, 26 bp, Homo sapiens
cggggctggccgtgtgctgccctgcc

SEQ ID NO: 11105 - DNA, 26 bp, Homo sapiens
ggggctggccgtgtgctgccctgcct

SEQ ID NO: 11106 - DNA, 26 bp, Homo sapiens
gggctggccgtgtgctgccctgcctc

SEQ ID NO: 11107 - DNA, 26 bp, Homo sapiens
ggctggccgtgtgctgccctgcctct

SEQ ID NO: 11108 - DNA, 26 bp, Homo sapiens
gctggccgtgtgctgccctgcctctg

SEQ ID NO: 11109 - DNA, 26 bp, Homo sapiens
ctggccgtgtgctgccctgcctctga

SEQ ID NO: 11110 - DNA, 26 bp, Homo sapiens
tggccgtgtgctgccctgcctctgag

SEQ ID NO: 11111 - DNA, 26 bp, Homo sapiens
ggccgtgtgctgccctgcctctgaga

SEQ ID NO: 11112 - DNA, 26 bp, Homo sapiens
gccgtgtgctgccctgcctctgagaa

SEQ ID NO: 11113 - DNA, 26 bp, Homo sapiens
ccgtgtgctgccctgcctctgagaag

SEQ ID NO: 11114 - DNA, 26 bp, Homo sapiens
cgtgtgctgccctgcctctgagaagt

SEQ ID NO: 11115 - DNA, 26 bp, Homo sapiens
gtgtgctgccctgcctctgagaagtc

SEQ ID NO: 11116 - DNA, 26 bp, Homo sapiens
tgtgctgccctgcctctgagaagtcc

SEQ ID NO: 11117 - DNA, 26 bp, Homo sapiens
gtgctgccctgcctctgagaagtccc

SEQ ID NO: 11118 - DNA, 26 bp, Homo sapiens
tgctgccctgcctctgagaagtccct

SEQ ID NO: 11119 - DNA, 26 bp, Homo sapiens
gctgccctgcctctgagaagtccctc

SEQ ID NO: 11120 - DNA, 26 bp, Homo sapiens
ctgccctgcctctgagaagtccctca

SEQ ID NO: 11121 - DNA, 26 bp, Homo sapiens
tgccctgcctctgagaagtccctcag

SEQ ID NO: 11122 - DNA, 26 bp, Homo sapiens
gccctgcctctgagaagtccctcagt

SEQ ID NO: 11123 - DNA, 26 bp, Homo sapiens
ccctgcctctgagaagtccctcagtc

SEQ ID NO: 11124 - DNA, 26 bp, Homo sapiens
cctgcctctgagaagtccctcagtcc

SEQ ID NO: 11125 - DNA, 26 bp, Homo sapiens
ctgcctctgagaagtccctcagtcca

SEQ ID NO: 11126 - DNA, 26 bp, Homo sapiens
tgcctctgagaagtccctcagtccat

SEQ ID NO: 11127 - DNA, 26 bp, Homo sapiens
gcctctgagaagtccctcagtccatg

SEQ ID NO: 11128 - DNA, 26 bp, Homo sapiens
cctctgagaagtccctcagtccatgt

SEQ ID NO: 11129 - DNA, 26 bp, Homo sapiens
ctctgagaagtccctcagtccatgtt

SEQ ID NO: 11130 - DNA, 26 bp, Homo sapiens
tctgagaagtccctcagtccatgttg

SEQ ID NO: 11131 - DNA, 26 bp, Homo sapiens
ctgagaagtccctcagtccatgttgg

SEQ ID NO: 11132 - DNA, 26 bp, Homo sapiens
tgagaagtccctcagtccatgttggt

SEQ ID NO: 11133 - DNA, 26 bp, Homo sapiens
gagaagtccctcagtccatgttggtg

SEQ ID NO: 11134 - DNA, 26 bp, Homo sapiens
agaagtccctcagtccatgttggtgc

SEQ ID NO: 11135 - DNA, 26 bp, Homo sapiens
gaagtccctcagtccatgttggtgct

SEQ ID NO: 11136 - DNA, 26 bp, Homo sapiens
aagtccctcagtccatgttggtgctg

SEQ ID NO: 11137 - DNA, 26 bp, Homo sapiens
agtccctcagtccatgttggtgctga

SEQ ID NO: 11138 - DNA, 26 bp, Homo sapiens
gtccctcagtccatgttggtgctgac

SEQ ID NO: 11139 - DNA, 26 bp, Homo sapiens
tccctcagtccatgttggtgctgacc

SEQ ID NO: 11140 - DNA, 26 bp, Homo sapiens
ccctcagtccatgttggtgctgaccg

SEQ ID NO: 11141 - DNA, 26 bp, Homo sapiens
cctcagtccatgttggtgctgaccga

SEQ ID NO: 11142 - DNA, 26 bp, Homo sapiens
ctcagtccatgttggtgctgaccgag

SEQ ID NO: 11143 - DNA, 26 bp, Homo sapiens
tcagtccatgttggtgctgaccgagc

SEQ ID NO: 11144 - DNA, 26 bp, Homo sapiens
cagtccatgttggtgctgaccgagcg

SEQ ID NO: 11145 - DNA, 26 bp, Homo sapiens
agtccatgttggtgctgaccgagcgg

SEQ ID NO: 11146 - DNA, 26 bp, Homo sapiens
gtccatgttggtgctgaccgagcggg

SEQ ID NO: 11147 - DNA, 26 bp, Homo sapiens
tccatgttggtgctgaccgagcggga

SEQ ID NO: 11148 - DNA, 26 bp, Homo sapiens
ccatgttggtgctgaccgagcgggag

SEQ ID NO: 11149 - DNA, 26 bp, Homo sapiens
catgttggtgctgaccgagcgggaga

SEQ ID NO: 11150 - DNA, 26 bp, Homo sapiens
atgttggtgctgaccgagcgggagat

SEQ ID NO: 11151 - DNA, 26 bp, Homo sapiens
tgttggtgctgaccgagcgggagatg

SEQ ID NO: 11152 - DNA, 26 bp, Homo sapiens
gttggtgctgaccgagcgggagatgc

SEQ ID NO: 11153 - DNA, 26 bp, Homo sapiens
ttggtgctgaccgagcgggagatgct

SEQ ID NO: 11154 - DNA, 26 bp, Homo sapiens
tggtgctgaccgagcgggagatgctg

SEQ ID NO: 11155 - DNA, 26 bp, Homo sapiens
ggtgctgaccgagcgggagatgctga

SEQ ID NO: 11156 - DNA, 26 bp, Homo sapiens
gtgctgaccgagcgggagatgctgag

SEQ ID NO: 11157 - DNA, 26 bp, Homo sapiens
tgctgaccgagcgggagatgctgagc

SEQ ID NO: 11158 - DNA, 26 bp, Homo sapiens
gctgaccgagcgggagatgctgagcg

SEQ ID NO: 11159 - DNA, 26 bp, Homo sapiens
ctgaccgagcgggagatgctgagcgt

SEQ ID NO: 11160 - DNA, 26 bp, Homo sapiens
tgaccgagcgggagatgctgagcgtc

SEQ ID NO: 11161 - DNA, 26 bp, Homo sapiens
gaccgagcgggagatgctgagcgtct

SEQ ID NO: 11162 - DNA, 26 bp, Homo sapiens
accgagcgggagatgctgagcgtctg

SEQ ID NO: 11163 - DNA, 26 bp, Homo sapiens
ccgagcgggagatgctgagcgtctgt

SEQ ID NO: 11164 - DNA, 26 bp, Homo sapiens
cgagcgggagatgctgagcgtctgtg

SEQ ID NO: 11165 - DNA, 26 bp, Homo sapiens
gagcgggagatgctgagcgtctgtgc

SEQ ID NO: 11166 - DNA, 26 bp, Homo sapiens
agcgggagatgctgagcgtctgtgcg

SEQ ID NO: 11167 - DNA, 26 bp, Homo sapiens
gcgggagatgctgagcgtctgtgcgg

SEQ ID NO: 11168 - DNA, 26 bp, Homo sapiens
cgggagatgctgagcgtctgtgcgga

SEQ ID NO: 11169 - DNA, 26 bp, Homo sapiens
gggagatgctgagcgtctgtgcggag

SEQ ID NO: 11170 - DNA, 26 bp, Homo sapiens
ggagatgctgagcgtctgtgcggaga

SEQ ID NO: 11171 - DNA, 26 bp, Homo sapiens
gagatgctgagcgtctgtgcggagac

SEQ ID NO: 11172 - DNA, 26 bp, Homo sapiens
agatgctgagcgtctgtgcggagacg

SEQ ID NO: 11173 - DNA, 26 bp, Homo sapiens
gatgctgagcgtctgtgcggagacgg

SEQ ID NO: 11174 - DNA, 26 bp, Homo sapiens
atgctgagcgtctgtgcggagacgga

SEQ ID NO: 11175 - DNA, 26 bp, Homo sapiens
tgctgagcgtctgtgcggagacggag

SEQ ID NO: 11176 - DNA, 26 bp, Homo sapiens
gctgagcgtctgtgcggagacggaga

SEQ ID NO: 11177 - DNA, 26 bp, Homo sapiens
ctgagcgtctgtgcggagacggagat

SEQ ID NO: 11178 - DNA, 26 bp, Homo sapiens
tgagcgtctgtgcggagacggagatg

SEQ ID NO: 11179 - DNA, 26 bp, Homo sapiens
gagcgtctgtgcggagacggagatgt

SEQ ID NO: 11180 - DNA, 26 bp, Homo sapiens
agcgtctgtgcggagacggagatgtc

SEQ ID NO: 11181 - DNA, 26 bp, Homo sapiens
gcgtctgtgcggagacggagatgtcc

SEQ ID NO: 11182 - DNA, 26 bp, Homo sapiens
cgtctgtgcggagacggagatgtcct

SEQ ID NO: 11183 - DNA, 26 bp, Homo sapiens
gtctgtgcggagacggagatgtcctc

SEQ ID NO: 11184 - DNA, 26 bp, Homo sapiens
tctgtgcggagacggagatgtcctcg

SEQ ID NO: 11185 - DNA, 26 bp, Homo sapiens
ctgtgcggagacggagatgtcctcgt

SEQ ID NO: 11186 - DNA, 26 bp, Homo sapiens
tgtgcggagacggagatgtcctcgtg

SEQ ID NO: 11187 - DNA, 26 bp, Homo sapiens
gtgcggagacggagatgtcctcgtgg

SEQ ID NO: 11188 - DNA, 26 bp, Homo sapiens
tgcggagacggagatgtcctcgtggt

SEQ ID NO: 11189 - DNA, 26 bp, Homo sapiens
gcggagacggagatgtcctcgtggtc

SEQ ID NO: 11190 - DNA, 26 bp, Homo sapiens
cggagacggagatgtcctcgtggtcc

SEQ ID NO: 11191 - DNA, 26 bp, Homo sapiens
ggagacggagatgtcctcgtggtcca

SEQ ID NO: 11192 - DNA, 26 bp, Homo sapiens
gagacggagatgtcctcgtggtccac

SEQ ID NO: 11193 - DNA, 26 bp, Homo sapiens
agacggagatgtcctcgtggtccaca

SEQ ID NO: 11194 - DNA, 26 bp, Homo sapiens
gacggagatgtcctcgtggtccacag

SEQ ID NO: 11195 - DNA, 26 bp, Homo sapiens
acggagatgtcctcgtggtccacagg

SEQ ID NO: 11196 - DNA, 26 bp, Homo sapiens
cggagatgtcctcgtggtccacaggg

SEQ ID NO: 11197 - DNA, 26 bp, Homo sapiens
ggagatgtcctcgtggtccacagggc

SEQ ID NO: 11198 - DNA, 26 bp, Homo sapiens
gagatgtcctcgtggtccacagggct

SEQ ID NO: 11199 - DNA, 26 bp, Homo sapiens
agatgtcctcgtggtccacagggctg

SEQ ID NO: 11200 - DNA, 26 bp, Homo sapiens
gatgtcctcgtggtccacagggctgt

SEQ ID NO: 11201 - DNA, 26 bp, Homo sapiens
atgtcctcgtggtccacagggctgtg

SEQ ID NO: 11202 - DNA, 26 bp, Homo sapiens
tgtcctcgtggtccacagggctgtgg

SEQ ID NO: 11203 - DNA, 26 bp, Homo sapiens
gtcctcgtggtccacagggctgtggt

SEQ ID NO: 11204 - DNA, 26 bp, Homo sapiens
tcctcgtggtccacagggctgtggta

SEQ ID NO: 11205 - DNA, 26 bp, Homo sapiens
cctcgtggtccacagggctgtggtag

SEQ ID NO: 11206 - DNA, 26 bp, Homo sapiens
ctcgtggtccacagggctgtggtagt

SEQ ID NO: 11207 - DNA, 26 bp, Homo sapiens
tcgtggtccacagggctgtggtagtc

SEQ ID NO: 11208 - DNA, 26 bp, Homo sapiens
cgtggtccacagggctgtggtagtcg

SEQ ID NO: 11209 - DNA, 26 bp, Homo sapiens
gtggtccacagggctgtggtagtcgg

SEQ ID NO: 11210 - DNA, 26 bp, Homo sapiens
tggtccacagggctgtggtagtcgga

SEQ ID NO: 11211 - DNA, 26 bp, Homo sapiens
ggtccacagggctgtggtagtcggag

SEQ ID NO: 11212 - DNA, 26 bp, Homo sapiens
gtccacagggctgtggtagtcggagg

SEQ ID NO: 11213 - DNA, 26 bp, Homo sapiens
tccacagggctgtggtagtcggaggt

SEQ ID NO: 11214 - DNA, 26 bp, Homo sapiens
ccacagggctgtggtagtcggaggtg

SEQ ID NO: 11215 - DNA, 26 bp, Homo sapiens
cacagggctgtggtagtcggaggtga

SEQ ID NO: 11216 - DNA, 26 bp, Homo sapiens
acagggctgtggtagtcggaggtgat

SEQ ID NO: 11217 - DNA, 26 bp, Homo sapiens
cagggctgtggtagtcggaggtgatg

SEQ ID NO: 11218 - DNA, 26 bp, Homo sapiens
agggctgtggtagtcggaggtgatgt

SEQ ID NO: 11219 - DNA, 26 bp, Homo sapiens
gggctgtggtagtcggaggtgatgtc

SEQ ID NO: 11220 - DNA, 26 bp, Homo sapiens
ggctgtggtagtcggaggtgatgtcg

SEQ ID NO: 11221 - DNA, 26 bp, Homo sapiens
gctgtggtagtcggaggtgatgtcgg

SEQ ID NO: 11222 - DNA, 26 bp, Homo sapiens
ctgtggtagtcggaggtgatgtcggg

SEQ ID NO: 11223 - DNA, 26 bp, Homo sapiens
tgtggtagtcggaggtgatgtcgggg

SEQ ID NO: 11224 - DNA, 26 bp, Homo sapiens
gtggtagtcggaggtgatgtcggggt

SEQ ID NO: 11225 - DNA, 26 bp, Homo sapiens
tggtagtcggaggtgatgtcggggtc

SEQ ID NO: 11226 - DNA, 26 bp, Homo sapiens
ggtagtcggaggtgatgtcggggtcg

SEQ ID NO: 11227 - DNA, 26 bp, Homo sapiens
gtagtcggaggtgatgtcggggtcga

SEQ ID NO: 11228 - DNA, 26 bp, Homo sapiens
tagtcggaggtgatgtcggggtcgaa

SEQ ID NO: 11229 - DNA, 26 bp, Homo sapiens
agtcggaggtgatgtcggggtcgaac

SEQ ID NO: 11230 - DNA, 26 bp, Homo sapiens
gtcggaggtgatgtcggggtcgaaca

SEQ ID NO: 11231 - DNA, 26 bp, Homo sapiens
tcggaggtgatgtcggggtcgaacag

SEQ ID NO: 11232 - DNA, 26 bp, Homo sapiens
cggaggtgatgtcggggtcgaacagc

SEQ ID NO: 11233 - DNA, 26 bp, Homo sapiens
ggaggtgatgtcggggtcgaacagcg

SEQ ID NO: 11234 - DNA, 26 bp, Homo sapiens
gaggtgatgtcggggtcgaacagcgg

SEQ ID NO: 11235 - DNA, 26 bp, Homo sapiens
aggtgatgtcggggtcgaacagcggc

SEQ ID NO: 11236 - DNA, 26 bp, Homo sapiens
ggtgatgtcggggtcgaacagcggca

SEQ ID NO: 11237 - DNA, 26 bp, Homo sapiens
gtgatgtcggggtcgaacagcggcac

SEQ ID NO: 11238 - DNA, 26 bp, Homo sapiens
tgatgtcggggtcgaacagcggcact

SEQ ID NO: 11239 - DNA, 26 bp, Homo sapiens
gatgtcggggtcgaacagcggcactt

SEQ ID NO: 11240 - DNA, 26 bp, Homo sapiens
atgtcggggtcgaacagcggcacttg

SEQ ID NO: 11241 - DNA, 26 bp, Homo sapiens
tgtcggggtcgaacagcggcacttgc

SEQ ID NO: 11242 - DNA, 26 bp, Homo sapiens
gtcggggtcgaacagcggcacttgca

SEQ ID NO: 11243 - DNA, 26 bp, Homo sapiens
tcggggtcgaacagcggcacttgcac

SEQ ID NO: 11244 - DNA, 26 bp, Homo sapiens
cggggtcgaacagcggcacttgcacg

SEQ ID NO: 11245 - DNA, 26 bp, Homo sapiens
ggggtcgaacagcggcacttgcacgg

SEQ ID NO: 11246 - DNA, 26 bp, Homo sapiens
gggtcgaacagcggcacttgcacggc

SEQ ID NO: 11247 - DNA, 26 bp, Homo sapiens
ggtcgaacagcggcacttgcacggcg

SEQ ID NO: 11248 - DNA, 26 bp, Homo sapiens
gtcgaacagcggcacttgcacggcgc

SEQ ID NO: 11249 - DNA, 26 bp, Homo sapiens
tcgaacagcggcacttgcacggcgcc

SEQ ID NO: 11250 - DNA, 26 bp, Homo sapiens
cgaacagcggcacttgcacggcgccc

SEQ ID NO: 11251 - DNA, 26 bp, Homo sapiens
gaacagcggcacttgcacggcgccca

SEQ ID NO: 11252 - DNA, 26 bp, Homo sapiens
aacagcggcacttgcacggcgcccag

SEQ ID NO: 11253 - DNA, 26 bp, Homo sapiens
acagcggcacttgcacggcgcccagg

SEQ ID NO: 11254 - DNA, 26 bp, Homo sapiens
cagcggcacttgcacggcgcccaggc

SEQ ID NO: 11255 - DNA, 26 bp, Homo sapiens
agcggcacttgcacggcgcccaggct

SEQ ID NO: 11256 - DNA, 26 bp, Homo sapiens
gcggcacttgcacggcgcccaggctg

SEQ ID NO: 11257 - DNA, 26 bp, Homo sapiens
cggcacttgcacggcgcccaggctgg

SEQ ID NO: 11258 - DNA, 26 bp, Homo sapiens
ggcacttgcacggcgcccaggctggc

SEQ ID NO: 11259 - DNA, 26 bp, Homo sapiens
gcacttgcacggcgcccaggctggcc

SEQ ID NO: 11260 - DNA, 26 bp, Homo sapiens
cacttgcacggcgcccaggctggccg

SEQ ID NO: 11261 - DNA, 26 bp, Homo sapiens
acttgcacggcgcccaggctggccga

SEQ ID NO: 11262 - DNA, 26 bp, Homo sapiens
cttgcacggcgcccaggctggccgag

SEQ ID NO: 11263 - DNA, 26 bp, Homo sapiens
ttgcacggcgcccaggctggccgagg

SEQ ID NO: 11264 - DNA, 26 bp, Homo sapiens
tgcacggcgcccaggctggccgaggt

SEQ ID NO: 11265 - DNA, 26 bp, Homo sapiens
gcacggcgcccaggctggccgaggtg

SEQ ID NO: 11266 - DNA, 26 bp, Homo sapiens
cacggcgcccaggctggccgaggtgc

SEQ ID NO: 11267 - DNA, 26 bp, Homo sapiens
acggcgcccaggctggccgaggtgcc

SEQ ID NO: 11268 - DNA, 26 bp, Homo sapiens
cggcgcccaggctggccgaggtgcca

SEQ ID NO: 11269 - DNA, 26 bp, Homo sapiens
ggcgcccaggctggccgaggtgccag

SEQ ID NO: 11270 - DNA, 26 bp, Homo sapiens
gcgcccaggctggccgaggtgccaga

SEQ ID NO: 11271 - DNA, 26 bp, Homo sapiens
cgcccaggctggccgaggtgccagag

SEQ ID NO: 11272 - DNA, 26 bp, Homo sapiens
gcccaggctggccgaggtgccagagc

SEQ ID NO: 11273 - DNA, 26 bp, Homo sapiens
cccaggctggccgaggtgccagagcg

SEQ ID NO: 11274 - DNA, 26 bp, Homo sapiens
ccaggctggccgaggtgccagagcgc

SEQ ID NO: 11275 - DNA, 26 bp, Homo sapiens
caggctggccgaggtgccagagcgca

SEQ ID NO: 11276 - DNA, 26 bp, Homo sapiens
aggctggccgaggtgccagagcgcag

SEQ ID NO: 11277 - DNA, 26 bp, Homo sapiens
ggctggccgaggtgccagagcgcagg

SEQ ID NO: 11278 - DNA, 26 bp, Homo sapiens
gctggccgaggtgccagagcgcaggc

SEQ ID NO: 11279 - DNA, 26 bp, Homo sapiens
ctggccgaggtgccagagcgcaggca

SEQ ID NO: 11280 - DNA, 26 bp, Homo sapiens
tggccgaggtgccagagcgcaggcag

SEQ ID NO: 11281 - DNA, 26 bp, Homo sapiens
ggccgaggtgccagagcgcaggcagc

SEQ ID NO: 11282 - DNA, 26 bp, Homo sapiens
gccgaggtgccagagcgcaggcagcg

SEQ ID NO: 11283 - DNA, 26 bp, Homo sapiens
ccgaggtgccagagcgcaggcagcgc

SEQ ID NO: 11284 - DNA, 26 bp, Homo sapiens
cgaggtgccagagcgcaggcagcgcg

SEQ ID NO: 11285 - DNA, 26 bp, Homo sapiens
gaggtgccagagcgcaggcagcgcga

SEQ ID NO: 11286 - DNA, 26 bp, Homo sapiens
aggtgccagagcgcaggcagcgcgaa

SEQ ID NO: 11287 - DNA, 26 bp, Homo sapiens
ggtgccagagcgcaggcagcgcgaat

SEQ ID NO: 11288 - DNA, 26 bp, Homo sapiens
gtgccagagcgcaggcagcgcgaata

SEQ ID NO: 11289 - DNA, 26 bp, Homo sapiens
tgccagagcgcaggcagcgcgaatag

SEQ ID NO: 11290 - DNA, 26 bp, Homo sapiens
gccagagcgcaggcagcgcgaataga

SEQ ID NO: 11291 - DNA, 26 bp, Homo sapiens
ccagagcgcaggcagcgcgaatagaa

SEQ ID NO: 11292 - DNA, 26 bp, Homo sapiens
cagagcgcaggcagcgcgaatagaag

SEQ ID NO: 11293 - DNA, 26 bp, Homo sapiens
agagcgcaggcagcgcgaatagaagc

SEQ ID NO: 11294 - DNA, 26 bp, Homo sapiens
gagcgcaggcagcgcgaatagaagcc

SEQ ID NO: 11295 - DNA, 26 bp, Homo sapiens
agcgcaggcagcgcgaatagaagccc

SEQ ID NO: 11296 - DNA, 26 bp, Homo sapiens
gcgcaggcagcgcgaatagaagccca

SEQ ID NO: 11297 - DNA, 26 bp, Homo sapiens
cgcaggcagcgcgaatagaagcccaa

SEQ ID NO: 11298 - DNA, 26 bp, Homo sapiens
gcaggcagcgcgaatagaagcccaac

SEQ ID NO: 11299 - DNA, 26 bp, Homo sapiens
caggcagcgcgaatagaagcccaaca

SEQ ID NO: 11300 - DNA, 26 bp, Homo sapiens
aggcagcgcgaatagaagcccaacag

SEQ ID NO: 11301 - DNA, 26 bp, Homo sapiens
ggcagcgcgaatagaagcccaacagc

SEQ ID NO: 11302 - DNA, 26 bp, Homo sapiens
gcagcgcgaatagaagcccaacagca

SEQ ID NO: 11303 - DNA, 26 bp, Homo sapiens
cagcgcgaatagaagcccaacagcag

SEQ ID NO: 11304 - DNA, 26 bp, Homo sapiens
agcgcgaatagaagcccaacagcagg

SEQ ID NO: 11305 - DNA, 26 bp, Homo sapiens
gcgcgaatagaagcccaacagcaggt

SEQ ID NO: 11306 - DNA, 26 bp, Homo sapiens
cgcgaatagaagcccaacagcaggtc

SEQ ID NO: 11307 - DNA, 26 bp, Homo sapiens
gcgaatagaagcccaacagcaggtcc

SEQ ID NO: 11308 - DNA, 26 bp, Homo sapiens
cgaatagaagcccaacagcaggtcca

SEQ ID NO: 11309 - DNA, 26 bp, Homo sapiens
gaatagaagcccaacagcaggtccag

SEQ ID NO: 11310 - DNA, 26 bp, Homo sapiens
aatagaagcccaacagcaggtccagc

SEQ ID NO: 11311 - DNA, 26 bp, Homo sapiens
atagaagcccaacagcaggtccagct

SEQ ID NO: 11312 - DNA, 26 bp, Homo sapiens
tagaagcccaacagcaggtccagctt

SEQ ID NO: 11313 - DNA, 26 bp, Homo sapiens
agaagcccaacagcaggtccagcttg

SEQ ID NO: 11314 - DNA, 26 bp, Homo sapiens
gaagcccaacagcaggtccagcttgt

SEQ ID NO: 11315 - DNA, 26 bp, Homo sapiens
aagcccaacagcaggtccagcttgtg

SEQ ID NO: 11316 - DNA, 26 bp, Homo sapiens
agcccaacagcaggtccagcttgtgc

SEQ ID NO: 11317 - DNA, 26 bp, Homo sapiens
gcccaacagcaggtccagcttgtgct

SEQ ID NO: 11318 - DNA, 26 bp, Homo sapiens
cccaacagcaggtccagcttgtgctc

SEQ ID NO: 11319 - DNA, 26 bp, Homo sapiens
ccaacagcaggtccagcttgtgctcg

SEQ ID NO: 11320 - DNA, 26 bp, Homo sapiens
caacagcaggtccagcttgtgctcga

SEQ ID NO: 11321 - DNA, 26 bp, Homo sapiens
aacagcaggtccagcttgtgctcgat

SEQ ID NO: 11322 - DNA, 26 bp, Homo sapiens
acagcaggtccagcttgtgctcgatg

SEQ ID NO: 11323 - DNA, 26 bp, Homo sapiens
cagcaggtccagcttgtgctcgatgg

SEQ ID NO: 11324 - DNA, 26 bp, Homo sapiens
agcaggtccagcttgtgctcgatgga

SEQ ID NO: 11325 - DNA, 26 bp, Homo sapiens
gcaggtccagcttgtgctcgatggac

SEQ ID NO: 11326 - DNA, 26 bp, Homo sapiens
caggtccagcttgtgctcgatggact

SEQ ID NO: 11327 - DNA, 26 bp, Homo sapiens
aggtccagcttgtgctcgatggactg

SEQ ID NO: 11328 - DNA, 26 bp, Homo sapiens
ggtccagcttgtgctcgatggactgc

SEQ ID NO: 11329 - DNA, 26 bp, Homo sapiens
gtccagcttgtgctcgatggactgca

SEQ ID NO: 11330 - DNA, 26 bp, Homo sapiens
tccagcttgtgctcgatggactgcac

SEQ ID NO: 11331 - DNA, 26 bp, Homo sapiens
ccagcttgtgctcgatggactgcacc

SEQ ID NO: 11332 - DNA, 26 bp, Homo sapiens
cagcttgtgctcgatggactgcacct

SEQ ID NO: 11333 - DNA, 26 bp, Homo sapiens
agcttgtgctcgatggactgcacctg

SEQ ID NO: 11334 - DNA, 26 bp, Homo sapiens
gcttgtgctcgatggactgcacctgc

SEQ ID NO: 11335 - DNA, 26 bp, Homo sapiens
cttgtgctcgatggactgcacctgct

SEQ ID NO: 11336 - DNA, 26 bp, Homo sapiens
ttgtgctcgatggactgcacctgctt

SEQ ID NO: 11337 - DNA, 26 bp, Homo sapiens
tgtgctcgatggactgcacctgcttc

SEQ ID NO: 11338 - DNA, 26 bp, Homo sapiens
gtgctcgatggactgcacctgcttct

SEQ ID NO: 11339 - DNA, 26 bp, Homo sapiens
tgctcgatggactgcacctgcttctc

SEQ ID NO: 11340 - DNA, 26 bp, Homo sapiens
gctcgatggactgcacctgcttctcc

SEQ ID NO: 11341 - DNA, 26 bp, Homo sapiens
ctcgatggactgcacctgcttctcca

SEQ ID NO: 11342 - DNA, 26 bp, Homo sapiens
tcgatggactgcacctgcttctccac

SEQ ID NO: 11343 - DNA, 26 bp, Homo sapiens
cgatggactgcacctgcttctccacc

SEQ ID NO: 11344 - DNA, 26 bp, Homo sapiens
gatggactgcacctgcttctccacct

SEQ ID NO: 11345 - DNA, 26 bp, Homo sapiens
atggactgcacctgcttctccacctt

SEQ ID NO: 11346 - DNA, 26 bp, Homo sapiens
tggactgcacctgcttctccaccttg

SEQ ID NO: 11347 - DNA, 26 bp, Homo sapiens
ggactgcacctgcttctccaccttga

SEQ ID NO: 11348 - DNA, 26 bp, Homo sapiens
gactgcacctgcttctccaccttgac

SEQ ID NO: 11349 - DNA, 26 bp, Homo sapiens
actgcacctgcttctccaccttgacc

SEQ ID NO: 11350 - DNA, 26 bp, Homo sapiens
ctgcacctgcttctccaccttgacca

SEQ ID NO: 11351 - DNA, 26 bp, Homo sapiens
tgcacctgcttctccaccttgaccac

SEQ ID NO: 11352 - DNA, 26 bp, Homo sapiens
gcacctgcttctccaccttgaccacg

SEQ ID NO: 11353 - DNA, 26 bp, Homo sapiens
cacctgcttctccaccttgaccacgc

SEQ ID NO: 11354 - DNA, 26 bp, Homo sapiens
acctgcttctccaccttgaccacgcg

SEQ ID NO: 11355 - DNA, 26 bp, Homo sapiens
cctgcttctccaccttgaccacgcgt

SEQ ID NO: 11356 - DNA, 26 bp, Homo sapiens
ctgcttctccaccttgaccacgcgtc

SEQ ID NO: 11357 - DNA, 26 bp, Homo sapiens
tgcttctccaccttgaccacgcgtcc

SEQ ID NO: 11358 - DNA, 26 bp, Homo sapiens
gcttctccaccttgaccacgcgtccc

SEQ ID NO: 11359 - DNA, 26 bp, Homo sapiens
cttctccaccttgaccacgcgtccca

SEQ ID NO: 11360 - DNA, 26 bp, Homo sapiens
ttctccaccttgaccacgcgtcccat

SEQ ID NO: 11361 - DNA, 26 bp, Homo sapiens
tctccaccttgaccacgcgtcccatc

SEQ ID NO: 11362 - DNA, 26 bp, Homo sapiens
ctccaccttgaccacgcgtcccatca

SEQ ID NO: 11363 - DNA, 26 bp, Homo sapiens
tccaccttgaccacgcgtcccatcat

SEQ ID NO: 11364 - DNA, 26 bp, Homo sapiens
ccaccttgaccacgcgtcccatcatg

SEQ ID NO: 11365 - DNA, 26 bp, Homo sapiens
caccttgaccacgcgtcccatcatgc

SEQ ID NO: 11366 - DNA, 26 bp, Homo sapiens
accttgaccacgcgtcccatcatgct

SEQ ID NO: 11367 - DNA, 26 bp, Homo sapiens
ccttgaccacgcgtcccatcatgctg

SEQ ID NO: 11368 - DNA, 26 bp, Homo sapiens
cttgaccacgcgtcccatcatgctga

SEQ ID NO: 11369 - DNA, 26 bp, Homo sapiens
ttgaccacgcgtcccatcatgctgat

SEQ ID NO: 11370 - DNA, 26 bp, Homo sapiens
tgaccacgcgtcccatcatgctgatt

SEQ ID NO: 11371 - DNA, 26 bp, Homo sapiens
gaccacgcgtcccatcatgctgattt

SEQ ID NO: 11372 - DNA, 26 bp, Homo sapiens
accacgcgtcccatcatgctgatttc

SEQ ID NO: 11373 - DNA, 26 bp, Homo sapiens
ccacgcgtcccatcatgctgatttca

SEQ ID NO: 11374 - DNA, 26 bp, Homo sapiens
cacgcgtcccatcatgctgatttcat

SEQ ID NO: 11375 - DNA, 26 bp, Homo sapiens
acgcgtcccatcatgctgatttcatc

SEQ ID NO: 11376 - DNA, 26 bp, Homo sapiens
cgcgtcccatcatgctgatttcatcc

SEQ ID NO: 11377 - DNA, 26 bp, Homo sapiens
gcgtcccatcatgctgatttcatcca

SEQ ID NO: 11378 - DNA, 26 bp, Homo sapiens
cgtcccatcatgctgatttcatccac

SEQ ID NO: 11379 - DNA, 26 bp, Homo sapiens
gtcccatcatgctgatttcatccacc

SEQ ID NO: 11380 - DNA, 26 bp, Homo sapiens
tcccatcatgctgatttcatccacca

SEQ ID NO: 11381 - DNA, 26 bp, Homo sapiens
cccatcatgctgatttcatccaccac

SEQ ID NO: 11382 - DNA, 26 bp, Homo sapiens
ccatcatgctgatttcatccaccacc

SEQ ID NO: 11383 - DNA, 26 bp, Homo sapiens
catcatgctgatttcatccaccacct

SEQ ID NO: 11384 - DNA, 26 bp, Homo sapiens
atcatgctgatttcatccaccacctc

SEQ ID NO: 11385 - DNA, 26 bp, Homo sapiens
tcatgctgatttcatccaccacctcc

SEQ ID NO: 11386 - DNA, 26 bp, Homo sapiens
catgctgatttcatccaccacctccg

SEQ ID NO: 11387 - DNA, 26 bp, Homo sapiens
atgctgatttcatccaccacctccgc

SEQ ID NO: 11388 - DNA, 26 bp, Homo sapiens
tgctgatttcatccaccacctccgcg

SEQ ID NO: 11389 - DNA, 26 bp, Homo sapiens
gctgatttcatccaccacctccgcgt

SEQ ID NO: 11390 - DNA, 26 bp, Homo sapiens
ctgatttcatccaccacctccgcgtc

SEQ ID NO: 11391 - DNA, 26 bp, Homo sapiens
tgatttcatccaccacctccgcgtcg

SEQ ID NO: 11392 - DNA, 26 bp, Homo sapiens
gatttcatccaccacctccgcgtcgg

SEQ ID NO: 11393 - DNA, 26 bp, Homo sapiens
atttcatccaccacctccgcgtcgga

SEQ ID NO: 11394 - DNA, 26 bp, Homo sapiens
tttcatccaccacctccgcgtcggag

SEQ ID NO: 11395 - DNA, 26 bp, Homo sapiens
ttcatccaccacctccgcgtcggagg

SEQ ID NO: 11396 - DNA, 26 bp, Homo sapiens
tcatccaccacctccgcgtcggaggg

SEQ ID NO: 11397 - DNA, 26 bp, Homo sapiens
catccaccacctccgcgtcggagggc

SEQ ID NO: 11398 - DNA, 26 bp, Homo sapiens
atccaccacctccgcgtcggagggcc

SEQ ID NO: 11399 - DNA, 26 bp, Homo sapiens
tccaccacctccgcgtcggagggccc

SEQ ID NO: 11400 - DNA, 26 bp, Homo sapiens
ccaccacctccgcgtcggagggcccc

SEQ ID NO: 11401 - DNA, 26 bp, Homo sapiens
caccacctccgcgtcggagggcccct

SEQ ID NO: 11402 - DNA, 26 bp, Homo sapiens
accacctccgcgtcggagggcccctt

SEQ ID NO: 11403 - DNA, 26 bp, Homo sapiens
ccacctccgcgtcggagggccccttg

SEQ ID NO: 11404 - DNA, 26 bp, Homo sapiens
cacctccgcgtcggagggccccttgt

SEQ ID NO: 11405 - DNA, 26 bp, Homo sapiens
acctccgcgtcggagggccccttgtc

SEQ ID NO: 11406 - DNA, 26 bp, Homo sapiens
cctccgcgtcggagggccccttgtcg

SEQ ID NO: 11407 - DNA, 26 bp, Homo sapiens
ctccgcgtcggagggccccttgtcgc

SEQ ID NO: 11408 - DNA, 26 bp, Homo sapiens
tccgcgtcggagggccccttgtcgcc

SEQ ID NO: 11409 - DNA, 26 bp, Homo sapiens
ccgcgtcggagggccccttgtcgccc

SEQ ID NO: 11410 - DNA, 26 bp, Homo sapiens
cgcgtcggagggccccttgtcgccct

SEQ ID NO: 11411 - DNA, 26 bp, Homo sapiens
gcgtcggagggccccttgtcgccctt

SEQ ID NO: 11412 - DNA, 26 bp, Homo sapiens
cgtcggagggccccttgtcgcccttc

SEQ ID NO: 11413 - DNA, 26 bp, Homo sapiens
gtcggagggccccttgtcgcccttct

SEQ ID NO: 11414 - DNA, 26 bp, Homo sapiens
tcggagggccccttgtcgcccttctc

SEQ ID NO: 11415 - DNA, 26 bp, Homo sapiens
cggagggccccttgtcgcccttctcc

SEQ ID NO: 11416 - DNA, 26 bp, Homo sapiens
ggagggccccttgtcgcccttctccc

SEQ ID NO: 11417 - DNA, 26 bp, Homo sapiens
gagggccccttgtcgcccttctcccg

SEQ ID NO: 11418 - DNA, 26 bp, Homo sapiens
agggccccttgtcgcccttctcccgg

SEQ ID NO: 11419 - DNA, 26 bp, Homo sapiens
gggccccttgtcgcccttctcccggg

SEQ ID NO: 11420 - DNA, 26 bp, Homo sapiens
ggccccttgtcgcccttctcccgggc

SEQ ID NO: 11421 - DNA, 26 bp, Homo sapiens
gccccttgtcgcccttctcccgggcc

SEQ ID NO: 11422 - DNA, 26 bp, Homo sapiens
ccccttgtcgcccttctcccgggcct

SEQ ID NO: 11423 - DNA, 26 bp, Homo sapiens
cccttgtcgcccttctcccgggcctt

SEQ ID NO: 11424 - DNA, 26 bp, Homo sapiens
ccttgtcgcccttctcccgggccttc

SEQ ID NO: 11425 - DNA, 26 bp, Homo sapiens
cttgtcgcccttctcccgggccttcc

SEQ ID NO: 11426 - DNA, 26 bp, Homo sapiens
ttgtcgcccttctcccgggccttcct

SEQ ID NO: 11427 - DNA, 26 bp, Homo sapiens
tgtcgcccttctcccgggccttcctg

SEQ ID NO: 11428 - DNA, 26 bp, Homo sapiens
gtcgcccttctcccgggccttcctgt

SEQ ID NO: 11429 - DNA, 26 bp, Homo sapiens
tcgcccttctcccgggccttcctgtc

SEQ ID NO: 11430 - DNA, 26 bp, Homo sapiens
cgcccttctcccgggccttcctgtcc

SEQ ID NO: 11431 - DNA, 26 bp, Homo sapiens
gcccttctcccgggccttcctgtccc

SEQ ID NO: 11432 - DNA, 26 bp, Homo sapiens
cccttctcccgggccttcctgtcccc

SEQ ID NO: 11433 - DNA, 26 bp, Homo sapiens
ccttctcccgggccttcctgtccccg

SEQ ID NO: 11434 - DNA, 26 bp, Homo sapiens
cttctcccgggccttcctgtccccgg

SEQ ID NO: 11435 - DNA, 26 bp, Homo sapiens
ttctcccgggccttcctgtccccggg

SEQ ID NO: 11436 - DNA, 26 bp, Homo sapiens
tctcccgggccttcctgtccccgggc

SEQ ID NO: 11437 - DNA, 26 bp, Homo sapiens
ctcccgggccttcctgtccccgggcc

SEQ ID NO: 11438 - DNA, 26 bp, Homo sapiens
tcccgggccttcctgtccccgggccc

SEQ ID NO: 11439 - DNA, 26 bp, Homo sapiens
cccgggccttcctgtccccgggcccc

SEQ ID NO: 11440 - DNA, 26 bp, Homo sapiens
ccgggccttcctgtccccgggccccc

SEQ ID NO: 11441 - DNA, 26 bp, Homo sapiens
cgggccttcctgtccccgggcccccg

SEQ ID NO: 11442 - DNA, 26 bp, Homo sapiens
gggccttcctgtccccgggcccccga

SEQ ID NO: 11443 - DNA, 26 bp, Homo sapiens
ggccttcctgtccccgggcccccgac

SEQ ID NO: 11444 - DNA, 26 bp, Homo sapiens
gccttcctgtccccgggcccccgacc

SEQ ID NO: 11445 - DNA, 26 bp, Homo sapiens
ccttcctgtccccgggcccccgaccc

SEQ ID NO: 11446 - DNA, 26 bp, Homo sapiens
cttcctgtccccgggcccccgaccca

SEQ ID NO: 11447 - DNA, 26 bp, Homo sapiens
ttcctgtccccgggcccccgacccac

SEQ ID NO: 11448 - DNA, 26 bp, Homo sapiens
tcctgtccccgggcccccgacccaca

SEQ ID NO: 11449 - DNA, 26 bp, Homo sapiens
cctgtccccgggcccccgacccacaa

SEQ ID NO: 11450 - DNA, 26 bp, Homo sapiens
ctgtccccgggcccccgacccacaat

SEQ ID NO: 11451 - DNA, 26 bp, Homo sapiens
tgtccccgggcccccgacccacaatt

SEQ ID NO: 11452 - DNA, 26 bp, Homo sapiens
gtccccgggcccccgacccacaattt

SEQ ID NO: 11453 - DNA, 26 bp, Homo sapiens
tccccgggcccccgacccacaatttg

SEQ ID NO: 11454 - DNA, 26 bp, Homo sapiens
ccccgggcccccgacccacaatttgg

SEQ ID NO: 11455 - DNA, 26 bp, Homo sapiens
cccgggcccccgacccacaatttggt

SEQ ID NO: 11456 - DNA, 26 bp, Homo sapiens
ccgggcccccgacccacaatttggtc

SEQ ID NO: 11457 - DNA, 26 bp, Homo sapiens
cgggcccccgacccacaatttggtcc

SEQ ID NO: 11458 - DNA, 26 bp, Homo sapiens
gggcccccgacccacaatttggtcca

SEQ ID NO: 11459 - DNA, 26 bp, Homo sapiens
ggcccccgacccacaatttggtccac

SEQ ID NO: 11460 - DNA, 26 bp, Homo sapiens
gcccccgacccacaatttggtccacc

SEQ ID NO: 11461 - DNA, 26 bp, Homo sapiens
cccccgacccacaatttggtccaccc

SEQ ID NO: 11462 - DNA, 26 bp, Homo sapiens
ccccgacccacaatttggtccacccg

SEQ ID NO: 11463 - DNA, 26 bp, Homo sapiens
cccgacccacaatttggtccacccga

SEQ ID NO: 11464 - DNA, 26 bp, Homo sapiens
ccgacccacaatttggtccacccgag

SEQ ID NO: 11465 - DNA, 26 bp, Homo sapiens
cgacccacaatttggtccacccgagt

SEQ ID NO: 11466 - DNA, 26 bp, Homo sapiens
gacccacaatttggtccacccgagtt

SEQ ID NO: 11467 - DNA, 26 bp, Homo sapiens
acccacaatttggtccacccgagttt

SEQ ID NO: 11468 - DNA, 26 bp, Homo sapiens
cccacaatttggtccacccgagtttg

SEQ ID NO: 11469 - DNA, 26 bp, Homo sapiens
ccacaatttggtccacccgagtttgc

SEQ ID NO: 11470 - DNA, 26 bp, Homo sapiens
cacaatttggtccacccgagtttgca

SEQ ID NO: 11471 - DNA, 26 bp, Homo sapiens
acaatttggtccacccgagtttgcag

SEQ ID NO: 11472 - DNA, 26 bp, Homo sapiens
caatttggtccacccgagtttgcagg

SEQ ID NO: 11473 - DNA, 26 bp, Homo sapiens
aatttggtccacccgagtttgcaggc

SEQ ID NO: 11474 - DNA, 26 bp, Homo sapiens
atttggtccacccgagtttgcaggct

SEQ ID NO: 11475 - DNA, 26 bp, Homo sapiens
tttggtccacccgagtttgcaggctc

SEQ ID NO: 11476 - DNA, 26 bp, Homo sapiens
ttggtccacccgagtttgcaggctct

SEQ ID NO: 11477 - DNA, 26 bp, Homo sapiens
tggtccacccgagtttgcaggctctt

SEQ ID NO: 11478 - DNA, 26 bp, Homo sapiens
ggtccacccgagtttgcaggctcttg

SEQ ID NO: 11479 - DNA, 26 bp, Homo sapiens
gtccacccgagtttgcaggctcttga

SEQ ID NO: 11480 - DNA, 26 bp, Homo sapiens
tccacccgagtttgcaggctcttgat

SEQ ID NO: 11481 - DNA, 26 bp, Homo sapiens
ccacccgagtttgcaggctcttgatc

SEQ ID NO: 11482 - DNA, 26 bp, Homo sapiens
cacccgagtttgcaggctcttgatcc

SEQ ID NO: 11483 - DNA, 26 bp, Homo sapiens
acccgagtttgcaggctcttgatccg

SEQ ID NO: 11484 - DNA, 26 bp, Homo sapiens
cccgagtttgcaggctcttgatccgg

SEQ ID NO: 11485 - DNA, 26 bp, Homo sapiens
ccgagtttgcaggctcttgatccggc

SEQ ID NO: 11486 - DNA, 26 bp, Homo sapiens
cgagtttgcaggctcttgatccggcc

SEQ ID NO: 11487 - DNA, 26 bp, Homo sapiens
gagtttgcaggctcttgatccggccc

SEQ ID NO: 11488 - DNA, 26 bp, Homo sapiens
agtttgcaggctcttgatccggccca

SEQ ID NO: 11489 - DNA, 26 bp, Homo sapiens
gtttgcaggctcttgatccggcccag

SEQ ID NO: 11490 - DNA, 26 bp, Homo sapiens
tttgcaggctcttgatccggcccagc

SEQ ID NO: 11491 - DNA, 26 bp, Homo sapiens
ttgcaggctcttgatccggcccagca

SEQ ID NO: 11492 - DNA, 26 bp, Homo sapiens
tgcaggctcttgatccggcccagcat

SEQ ID NO: 11493 - DNA, 26 bp, Homo sapiens
gcaggctcttgatccggcccagcatg

SEQ ID NO: 11494 - DNA, 26 bp, Homo sapiens
caggctcttgatccggcccagcatgt

SEQ ID NO: 11495 - DNA, 26 bp, Homo sapiens
aggctcttgatccggcccagcatgtc

SEQ ID NO: 11496 - DNA, 26 bp, Homo sapiens
ggctcttgatccggcccagcatgtcc

SEQ ID NO: 11497 - DNA, 26 bp, Homo sapiens
gctcttgatccggcccagcatgtcca

SEQ ID NO: 11498 - DNA, 26 bp, Homo sapiens
ctcttgatccggcccagcatgtccag

SEQ ID NO: 11499 - DNA, 26 bp, Homo sapiens
tcttgatccggcccagcatgtccagg

SEQ ID NO: 11500 - DNA, 26 bp, Homo sapiens
cttgatccggcccagcatgtccaggt

SEQ ID NO: 11501 - DNA, 26 bp, Homo sapiens
ttgatccggcccagcatgtccaggtg

SEQ ID NO: 11502 - DNA, 26 bp, Homo sapiens
tgatccggcccagcatgtccaggtgg

SEQ ID NO: 11503 - DNA, 26 bp, Homo sapiens
gatccggcccagcatgtccaggtggc

SEQ ID NO: 11504 - DNA, 26 bp, Homo sapiens
atccggcccagcatgtccaggtggcc

SEQ ID NO: 11505 - DNA, 26 bp, Homo sapiens
tccggcccagcatgtccaggtggcct

SEQ ID NO: 11506 - DNA, 26 bp, Homo sapiens
ccggcccagcatgtccaggtggcctg

SEQ ID NO: 11507 - DNA, 26 bp, Homo sapiens
cggcccagcatgtccaggtggcctgc

SEQ ID NO: 11508 - DNA, 26 bp, Homo sapiens
ggcccagcatgtccaggtggcctgct

SEQ ID NO: 11509 - DNA, 26 bp, Homo sapiens
gcccagcatgtccaggtggcctgctg

SEQ ID NO: 11510 - DNA, 26 bp, Homo sapiens
cccagcatgtccaggtggcctgctga

SEQ ID NO: 11511 - DNA, 26 bp, Homo sapiens
ccagcatgtccaggtggcctgctgag

SEQ ID NO: 11512 - DNA, 26 bp, Homo sapiens
cagcatgtccaggtggcctgctgagt

SEQ ID NO: 11513 - DNA, 26 bp, Homo sapiens
agcatgtccaggtggcctgctgagta

SEQ ID NO: 11514 - DNA, 26 bp, Homo sapiens
gcatgtccaggtggcctgctgagtac

SEQ ID NO: 11515 - DNA, 26 bp, Homo sapiens
catgtccaggtggcctgctgagtact

SEQ ID NO: 11516 - DNA, 26 bp, Homo sapiens
atgtccaggtggcctgctgagtactg

SEQ ID NO: 11517 - DNA, 26 bp, Homo sapiens
tgtccaggtggcctgctgagtactgc

SEQ ID NO: 11518 - DNA, 26 bp, Homo sapiens
gtccaggtggcctgctgagtactgct

SEQ ID NO: 11519 - DNA, 26 bp, Homo sapiens
tccaggtggcctgctgagtactgctc

SEQ ID NO: 11520 - DNA, 26 bp, Homo sapiens
ccaggtggcctgctgagtactgctca

SEQ ID NO: 11521 - DNA, 26 bp, Homo sapiens
caggtggcctgctgagtactgctcaa

SEQ ID NO: 11522 - DNA, 26 bp, Homo sapiens
aggtggcctgctgagtactgctcaat

SEQ ID NO: 11523 - DNA, 26 bp, Homo sapiens
ggtggcctgctgagtactgctcaatg

SEQ ID NO: 11524 - DNA, 26 bp, Homo sapiens
gtggcctgctgagtactgctcaatga

SEQ ID NO: 11525 - DNA, 26 bp, Homo sapiens
tggcctgctgagtactgctcaatgac

SEQ ID NO: 11526 - DNA, 26 bp, Homo sapiens
ggcctgctgagtactgctcaatgacg

SEQ ID NO: 11527 - DNA, 26 bp, Homo sapiens
gcctgctgagtactgctcaatgacgt

SEQ ID NO: 11528 - DNA, 26 bp, Homo sapiens
cctgctgagtactgctcaatgacgtc

SEQ ID NO: 11529 - DNA, 26 bp, Homo sapiens
ctgctgagtactgctcaatgacgtcc

SEQ ID NO: 11530 - DNA, 26 bp, Homo sapiens
tgctgagtactgctcaatgacgtcct

SEQ ID NO: 11531 - DNA, 26 bp, Homo sapiens
gctgagtactgctcaatgacgtcctt

SEQ ID NO: 11532 - DNA, 26 bp, Homo sapiens
ctgagtactgctcaatgacgtccttc

SEQ ID NO: 11533 - DNA, 26 bp, Homo sapiens
tgagtactgctcaatgacgtccttca

SEQ ID NO: 11534 - DNA, 26 bp, Homo sapiens
gagtactgctcaatgacgtccttcac

SEQ ID NO: 11535 - DNA, 26 bp, Homo sapiens
agtactgctcaatgacgtccttcacg

SEQ ID NO: 11536 - DNA, 26 bp, Homo sapiens
gtactgctcaatgacgtccttcacgt

SEQ ID NO: 11537 - DNA, 26 bp, Homo sapiens
tactgctcaatgacgtccttcacgtc

SEQ ID NO: 11538 - DNA, 26 bp, Homo sapiens
actgctcaatgacgtccttcacgtcg

SEQ ID NO: 11539 - DNA, 26 bp, Homo sapiens
ctgctcaatgacgtccttcacgtcgt

SEQ ID NO: 11540 - DNA, 26 bp, Homo sapiens
tgctcaatgacgtccttcacgtcgta

SEQ ID NO: 11541 - DNA, 26 bp, Homo sapiens
gctcaatgacgtccttcacgtcgtac

SEQ ID NO: 11542 - DNA, 26 bp, Homo sapiens
ctcaatgacgtccttcacgtcgtacg

SEQ ID NO: 11543 - DNA, 26 bp, Homo sapiens
tcaatgacgtccttcacgtcgtacgg

SEQ ID NO: 11544 - DNA, 26 bp, Homo sapiens
caatgacgtccttcacgtcgtacggt

SEQ ID NO: 11545 - DNA, 26 bp, Homo sapiens
aatgacgtccttcacgtcgtacggtc

SEQ ID NO: 11546 - DNA, 26 bp, Homo sapiens
atgacgtccttcacgtcgtacggtcg

SEQ ID NO: 11547 - DNA, 26 bp, Homo sapiens
tgacgtccttcacgtcgtacggtcgc

SEQ ID NO: 11548 - DNA, 26 bp, Homo sapiens
gacgtccttcacgtcgtacggtcgca

SEQ ID NO: 11549 - DNA, 26 bp, Homo sapiens
acgtccttcacgtcgtacggtcgcag

SEQ ID NO: 11550 - DNA, 26 bp, Homo sapiens
cgtccttcacgtcgtacggtcgcagt

SEQ ID NO: 11551 - DNA, 26 bp, Homo sapiens
gtccttcacgtcgtacggtcgcagtg

SEQ ID NO: 11552 - DNA, 26 bp, Homo sapiens
tccttcacgtcgtacggtcgcagtgt

SEQ ID NO: 11553 - DNA, 26 bp, Homo sapiens
ccttcacgtcgtacggtcgcagtgtc

SEQ ID NO: 11554 - DNA, 26 bp, Homo sapiens
cttcacgtcgtacggtcgcagtgtct

SEQ ID NO: 11555 - DNA, 26 bp, Homo sapiens
ttcacgtcgtacggtcgcagtgtctc

SEQ ID NO: 11556 - DNA, 26 bp, Homo sapiens
tcacgtcgtacggtcgcagtgtctcc

SEQ ID NO: 11557 - DNA, 26 bp, Homo sapiens
cacgtcgtacggtcgcagtgtctcct

SEQ ID NO: 11558 - DNA, 26 bp, Homo sapiens
acgtcgtacggtcgcagtgtctcctt

SEQ ID NO: 11559 - DNA, 26 bp, Homo sapiens
cgtcgtacggtcgcagtgtctccttg

SEQ ID NO: 11560 - DNA, 26 bp, Homo sapiens
gtcgtacggtcgcagtgtctccttga

SEQ ID NO: 11561 - DNA, 26 bp, Homo sapiens
tcgtacggtcgcagtgtctccttgaa

SEQ ID NO: 11562 - DNA, 26 bp, Homo sapiens
cgtacggtcgcagtgtctccttgaat

SEQ ID NO: 11563 - DNA, 26 bp, Homo sapiens
gtacggtcgcagtgtctccttgaatt

SEQ ID NO: 11564 - DNA, 26 bp, Homo sapiens
tacggtcgcagtgtctccttgaattt

SEQ ID NO: 11565 - DNA, 26 bp, Homo sapiens
acggtcgcagtgtctccttgaatttc

SEQ ID NO: 11566 - DNA, 26 bp, Homo sapiens
cggtcgcagtgtctccttgaatttcc

SEQ ID NO: 11567 - DNA, 26 bp, Homo sapiens
ggtcgcagtgtctccttgaatttcct

SEQ ID NO: 11568 - DNA, 26 bp, Homo sapiens
gtcgcagtgtctccttgaatttcctt

SEQ ID NO: 11569 - DNA, 26 bp, Homo sapiens
tcgcagtgtctccttgaatttccttt

SEQ ID NO: 11570 - DNA, 26 bp, Homo sapiens
cgcagtgtctccttgaatttcctttt

SEQ ID NO: 11571 - DNA, 26 bp, Homo sapiens
gcagtgtctccttgaatttccttttg

SEQ ID NO: 11572 - DNA, 26 bp, Homo sapiens
cagtgtctccttgaatttccttttgg

SEQ ID NO: 11573 - DNA, 26 bp, Homo sapiens
agtgtctccttgaatttccttttggc

SEQ ID NO: 11574 - DNA, 26 bp, Homo sapiens
gtgtctccttgaatttccttttggcc

SEQ ID NO: 11575 - DNA, 26 bp, Homo sapiens
tgtctccttgaatttccttttggcca

SEQ ID NO: 11576 - DNA, 26 bp, Homo sapiens
gtctccttgaatttccttttggccac

SEQ ID NO: 11577 - DNA, 26 bp, Homo sapiens
tctccttgaatttccttttggccacc

SEQ ID NO: 11578 - DNA, 26 bp, Homo sapiens
ctccttgaatttccttttggccacca

SEQ ID NO: 11579 - DNA, 26 bp, Homo sapiens
tccttgaatttccttttggccaccag

SEQ ID NO: 11580 - DNA, 26 bp, Homo sapiens
ccttgaatttccttttggccaccagg

SEQ ID NO: 11581 - DNA, 26 bp, Homo sapiens
cttgaatttccttttggccaccagga

SEQ ID NO: 11582 - DNA, 26 bp, Homo sapiens
ttgaatttccttttggccaccaggaa

SEQ ID NO: 11583 - DNA, 26 bp, Homo sapiens
tgaatttccttttggccaccaggaac

SEQ ID NO: 11584 - DNA, 26 bp, Homo sapiens
gaatttccttttggccaccaggaact

SEQ ID NO: 11585 - DNA, 26 bp, Homo sapiens
aatttccttttggccaccaggaactt

SEQ ID NO: 11586 - DNA, 26 bp, Homo sapiens
atttccttttggccaccaggaacttg

SEQ ID NO: 11587 - DNA, 26 bp, Homo sapiens
tttccttttggccaccaggaacttga

SEQ ID NO: 11588 - DNA, 26 bp, Homo sapiens
ttccttttggccaccaggaacttgag

SEQ ID NO: 11589 - DNA, 26 bp, Homo sapiens
tccttttggccaccaggaacttgaga

SEQ ID NO: 11590 - DNA, 26 bp, Homo sapiens
ccttttggccaccaggaacttgagaa

SEQ ID NO: 11591 - DNA, 26 bp, Homo sapiens
cttttggccaccaggaacttgagaat

SEQ ID NO: 11592 - DNA, 26 bp, Homo sapiens
ttttggccaccaggaacttgagaatc

SEQ ID NO: 11593 - DNA, 26 bp, Homo sapiens
tttggccaccaggaacttgagaatcc

SEQ ID NO: 11594 - DNA, 26 bp, Homo sapiens
ttggccaccaggaacttgagaatcct

SEQ ID NO: 11595 - DNA, 26 bp, Homo sapiens
tggccaccaggaacttgagaatcctg

SEQ ID NO: 11596 - DNA, 26 bp, Homo sapiens
ggccaccaggaacttgagaatcctga

SEQ ID NO: 11597 - DNA, 26 bp, Homo sapiens
gccaccaggaacttgagaatcctgat

SEQ ID NO: 11598 - DNA, 26 bp, Homo sapiens
ccaccaggaacttgagaatcctgatg

SEQ ID NO: 11599 - DNA, 26 bp, Homo sapiens
caccaggaacttgagaatcctgatgg

SEQ ID NO: 11600 - DNA, 26 bp, Homo sapiens
accaggaacttgagaatcctgatgga

SEQ ID NO: 11601 - DNA, 26 bp, Homo sapiens
ccaggaacttgagaatcctgatggag

SEQ ID NO: 11602 - DNA, 26 bp, Homo sapiens
caggaacttgagaatcctgatggagc

SEQ ID NO: 11603 - DNA, 26 bp, Homo sapiens
aggaacttgagaatcctgatggagcg

SEQ ID NO: 11604 - DNA, 26 bp, Homo sapiens
ggaacttgagaatcctgatggagcgg

SEQ ID NO: 11605 - DNA, 26 bp, Homo sapiens
gaacttgagaatcctgatggagcgga

SEQ ID NO: 11606 - DNA, 26 bp, Homo sapiens
aacttgagaatcctgatggagcggat

SEQ ID NO: 11607 - DNA, 26 bp, Homo sapiens
acttgagaatcctgatggagcggatg

SEQ ID NO: 11608 - DNA, 26 bp, Homo sapiens
cttgagaatcctgatggagcggatga

SEQ ID NO: 11609 - DNA, 26 bp, Homo sapiens
ttgagaatcctgatggagcggatgac

SEQ ID NO: 11610 - DNA, 26 bp, Homo sapiens
tgagaatcctgatggagcggatgact

SEQ ID NO: 11611 - DNA, 26 bp, Homo sapiens
gagaatcctgatggagcggatgactg

SEQ ID NO: 11612 - DNA, 26 bp, Homo sapiens
agaatcctgatggagcggatgactgt

SEQ ID NO: 11613 - DNA, 26 bp, Homo sapiens
gaatcctgatggagcggatgactgtc

SEQ ID NO: 11614 - DNA, 26 bp, Homo sapiens
aatcctgatggagcggatgactgtct

SEQ ID NO: 11615 - DNA, 26 bp, Homo sapiens
atcctgatggagcggatgactgtctt

SEQ ID NO: 11616 - DNA, 26 bp, Homo sapiens
tcctgatggagcggatgactgtcttc

SEQ ID NO: 11617 - DNA, 26 bp, Homo sapiens
cctgatggagcggatgactgtcttca

SEQ ID NO: 11618 - DNA, 26 bp, Homo sapiens
ctgatggagcggatgactgtcttcac

SEQ ID NO: 11619 - DNA, 26 bp, Homo sapiens
tgatggagcggatgactgtcttcaca

SEQ ID NO: 11620 - DNA, 26 bp, Homo sapiens
gatggagcggatgactgtcttcacag

SEQ ID NO: 11621 - DNA, 26 bp, Homo sapiens
atggagcggatgactgtcttcacagc

SEQ ID NO: 11622 - DNA, 26 bp, Homo sapiens
tggagcggatgactgtcttcacagca

SEQ ID NO: 11623 - DNA, 26 bp, Homo sapiens
ggagcggatgactgtcttcacagcag

SEQ ID NO: 11624 - DNA, 26 bp, Homo sapiens
gagcggatgactgtcttcacagcagg

SEQ ID NO: 11625 - DNA, 26 bp, Homo sapiens
agcggatgactgtcttcacagcaggc

SEQ ID NO: 11626 - DNA, 26 bp, Homo sapiens
gcggatgactgtcttcacagcaggca

SEQ ID NO: 11627 - DNA, 26 bp, Homo sapiens
cggatgactgtcttcacagcaggcat

SEQ ID NO: 11628 - DNA, 26 bp, Homo sapiens
ggatgactgtcttcacagcaggcatg

SEQ ID NO: 11629 - DNA, 26 bp, Homo sapiens
gatgactgtcttcacagcaggcatga

SEQ ID NO: 11630 - DNA, 26 bp, Homo sapiens
atgactgtcttcacagcaggcatgat

SEQ ID NO: 11631 - DNA, 26 bp, Homo sapiens
tgactgtcttcacagcaggcatgatg

SEQ ID NO: 11632 - DNA, 26 bp, Homo sapiens
gactgtcttcacagcaggcatgatgt

SEQ ID NO: 11633 - DNA, 26 bp, Homo sapiens
actgtcttcacagcaggcatgatgtc

SEQ ID NO: 11634 - DNA, 26 bp, Homo sapiens
ctgtcttcacagcaggcatgatgtcg

SEQ ID NO: 11635 - DNA, 26 bp, Homo sapiens
tgtcttcacagcaggcatgatgtcgt

SEQ ID NO: 11636 - DNA, 26 bp, Homo sapiens
gtcttcacagcaggcatgatgtcgtc

SEQ ID NO: 11637 - DNA, 26 bp, Homo sapiens
tcttcacagcaggcatgatgtcgtcc

SEQ ID NO: 11638 - DNA, 26 bp, Homo sapiens
cttcacagcaggcatgatgtcgtcca

SEQ ID NO: 11639 - DNA, 26 bp, Homo sapiens
ttcacagcaggcatgatgtcgtccac

SEQ ID NO: 11640 - DNA, 26 bp, Homo sapiens
tcacagcaggcatgatgtcgtccacc

SEQ ID NO: 11641 - DNA, 26 bp, Homo sapiens
cacagcaggcatgatgtcgtccaccg

SEQ ID NO: 11642 - DNA, 26 bp, Homo sapiens
acagcaggcatgatgtcgtccaccgt

SEQ ID NO: 11643 - DNA, 26 bp, Homo sapiens
cagcaggcatgatgtcgtccaccgtg

SEQ ID NO: 11644 - DNA, 26 bp, Homo sapiens
agcaggcatgatgtcgtccaccgtga

SEQ ID NO: 11645 - DNA, 26 bp, Homo sapiens
gcaggcatgatgtcgtccaccgtgag

SEQ ID NO: 11646 - DNA, 26 bp, Homo sapiens
caggcatgatgtcgtccaccgtgagc

SEQ ID NO: 11647 - DNA, 26 bp, Homo sapiens
aggcatgatgtcgtccaccgtgagct

SEQ ID NO: 11648 - DNA, 26 bp, Homo sapiens
ggcatgatgtcgtccaccgtgagctc

SEQ ID NO: 11649 - DNA, 26 bp, Homo sapiens
gcatgatgtcgtccaccgtgagctca

SEQ ID NO: 11650 - DNA, 26 bp, Homo sapiens
catgatgtcgtccaccgtgagctcac

SEQ ID NO: 11651 - DNA, 26 bp, Homo sapiens
atgatgtcgtccaccgtgagctcaca

SEQ ID NO: 11652 - DNA, 26 bp, Homo sapiens
tgatgtcgtccaccgtgagctcacac

SEQ ID NO: 11653 - DNA, 26 bp, Homo sapiens
gatgtcgtccaccgtgagctcacact

SEQ ID NO: 11654 - DNA, 26 bp, Homo sapiens
atgtcgtccaccgtgagctcacactg

SEQ ID NO: 11655 - DNA, 26 bp, Homo sapiens
tgtcgtccaccgtgagctcacactgg

SEQ ID NO: 11656 - DNA, 26 bp, Homo sapiens
gtcgtccaccgtgagctcacactggt

SEQ ID NO: 11657 - DNA, 26 bp, Homo sapiens
tcgtccaccgtgagctcacactggta

SEQ ID NO: 11658 - DNA, 26 bp, Homo sapiens
cgtccaccgtgagctcacactggtag

SEQ ID NO: 11659 - DNA, 26 bp, Homo sapiens
gtccaccgtgagctcacactggtagc

SEQ ID NO: 11660 - DNA, 26 bp, Homo sapiens
tccaccgtgagctcacactggtagct

SEQ ID NO: 11661 - DNA, 26 bp, Homo sapiens
ccaccgtgagctcacactggtagctc

SEQ ID NO: 11662 - DNA, 26 bp, Homo sapiens
caccgtgagctcacactggtagctct

SEQ ID NO: 11663 - DNA, 26 bp, Homo sapiens
accgtgagctcacactggtagctctt

SEQ ID NO: 11664 - DNA, 26 bp, Homo sapiens
ccgtgagctcacactggtagctcttc

SEQ ID NO: 11665 - DNA, 26 bp, Homo sapiens
cgtgagctcacactggtagctcttct

SEQ ID NO: 11666 - DNA, 26 bp, Homo sapiens
gtgagctcacactggtagctcttctc

SEQ ID NO: 11667 - DNA, 26 bp, Homo sapiens
tgagctcacactggtagctcttctcc

SEQ ID NO: 11668 - DNA, 26 bp, Homo sapiens
gagctcacactggtagctcttctcct

SEQ ID NO: 11669 - DNA, 26 bp, Homo sapiens
agctcacactggtagctcttctcctc

SEQ ID NO: 11670 - DNA, 26 bp, Homo sapiens
gctcacactggtagctcttctcctct

SEQ ID NO: 11671 - DNA, 26 bp, Homo sapiens
ctcacactggtagctcttctcctctg

SEQ ID NO: 11672 - DNA, 26 bp, Homo sapiens
tcacactggtagctcttctcctctgc

SEQ ID NO: 11673 - DNA, 26 bp, Homo sapiens
cacactggtagctcttctcctctgct

SEQ ID NO: 11674 - DNA, 26 bp, Homo sapiens
acactggtagctcttctcctctgcta

SEQ ID NO: 11675 - DNA, 26 bp, Homo sapiens
cactggtagctcttctcctctgctac

SEQ ID NO: 11676 - DNA, 26 bp, Homo sapiens
actggtagctcttctcctctgctact

SEQ ID NO: 11677 - DNA, 26 bp, Homo sapiens
ctggtagctcttctcctctgctactt

SEQ ID NO: 11678 - DNA, 26 bp, Homo sapiens
tggtagctcttctcctctgctacttc

SEQ ID NO: 11679 - DNA, 26 bp, Homo sapiens
ggtagctcttctcctctgctacttcc

SEQ ID NO: 11680 - DNA, 26 bp, Homo sapiens
gtagctcttctcctctgctacttcct

SEQ ID NO: 11681 - DNA, 26 bp, Homo sapiens
tagctcttctcctctgctacttcctc

SEQ ID NO: 11682 - DNA, 26 bp, Homo sapiens
agctcttctcctctgctacttcctct

SEQ ID NO: 11683 - DNA, 26 bp, Homo sapiens
gctcttctcctctgctacttcctctg

SEQ ID NO: 11684 - DNA, 26 bp, Homo sapiens
ctcttctcctctgctacttcctctga

SEQ ID NO: 11685 - DNA, 26 bp, Homo sapiens
tcttctcctctgctacttcctctgag

SEQ ID NO: 11686 - DNA, 26 bp, Homo sapiens
cttctcctctgctacttcctctgagg

SEQ ID NO: 11687 - DNA, 26 bp, Homo sapiens
ttctcctctgctacttcctctgaggg

SEQ ID NO: 11688 - DNA, 26 bp, Homo sapiens
tctcctctgctacttcctctgagggg

SEQ ID NO: 11689 - DNA, 26 bp, Homo sapiens
ctcctctgctacttcctctgaggggg

SEQ ID NO: 11690 - DNA, 26 bp, Homo sapiens
tcctctgctacttcctctgagggggc

SEQ ID NO: 11691 - DNA, 26 bp, Homo sapiens
cctctgctacttcctctgagggggca

SEQ ID NO: 11692 - DNA, 26 bp, Homo sapiens
ctctgctacttcctctgagggggcat

SEQ ID NO: 11693 - DNA, 26 bp, Homo sapiens
tctgctacttcctctgagggggcatc

SEQ ID NO: 11694 - DNA, 26 bp, Homo sapiens
ctgctacttcctctgagggggcatcc

SEQ ID NO: 11695 - DNA, 26 bp, Homo sapiens
tgctacttcctctgagggggcatcct

SEQ ID NO: 11696 - DNA, 26 bp, Homo sapiens
gctacttcctctgagggggcatcctc

SEQ ID NO: 11697 - DNA, 26 bp, Homo sapiens
ctacttcctctgagggggcatcctca

SEQ ID NO: 11698 - DNA, 26 bp, Homo sapiens
tacttcctctgagggggcatcctcag

SEQ ID NO: 11699 - DNA, 26 bp, Homo sapiens
acttcctctgagggggcatcctcagc

SEQ ID NO: 11700 - DNA, 26 bp, Homo sapiens
cttcctctgagggggcatcctcagca

SEQ ID NO: 11701 - DNA, 26 bp, Homo sapiens
ttcctctgagggggcatcctcagcag

SEQ ID NO: 11702 - DNA, 26 bp, Homo sapiens
tcctctgagggggcatcctcagcaga

SEQ ID NO: 11703 - DNA, 26 bp, Homo sapiens
cctctgagggggcatcctcagcagag

SEQ ID NO: 11704 - DNA, 26 bp, Homo sapiens
ctctgagggggcatcctcagcagagg

SEQ ID NO: 11705 - DNA, 26 bp, Homo sapiens
tctgagggggcatcctcagcagaggt

SEQ ID NO: 11706 - DNA, 26 bp, Homo sapiens
ctgagggggcatcctcagcagaggtg

SEQ ID NO: 11707 - DNA, 26 bp, Homo sapiens
tgagggggcatcctcagcagaggtgc

SEQ ID NO: 11708 - DNA, 26 bp, Homo sapiens
gagggggcatcctcagcagaggtgcg

SEQ ID NO: 11709 - DNA, 26 bp, Homo sapiens
agggggcatcctcagcagaggtgcgg

SEQ ID NO: 11710 - DNA, 26 bp, Homo sapiens
gggggcatcctcagcagaggtgcggg

SEQ ID NO: 11711 - DNA, 26 bp, Homo sapiens
ggggcatcctcagcagaggtgcgggg

SEQ ID NO: 11712 - DNA, 26 bp, Homo sapiens
gggcatcctcagcagaggtgcggggt

SEQ ID NO: 11713 - DNA, 26 bp, Homo sapiens
ggcatcctcagcagaggtgcggggtt

SEQ ID NO: 11714 - DNA, 26 bp, Homo sapiens
gcatcctcagcagaggtgcggggttt

SEQ ID NO: 11715 - DNA, 26 bp, Homo sapiens
catcctcagcagaggtgcggggtttg

SEQ ID NO: 11716 - DNA, 26 bp, Homo sapiens
atcctcagcagaggtgcggggtttga

SEQ ID NO: 11717 - DNA, 26 bp, Homo sapiens
tcctcagcagaggtgcggggtttgag

SEQ ID NO: 11718 - DNA, 26 bp, Homo sapiens
cctcagcagaggtgcggggtttgagt

SEQ ID NO: 11719 - DNA, 26 bp, Homo sapiens
ctcagcagaggtgcggggtttgagtc

SEQ ID NO: 11720 - DNA, 26 bp, Homo sapiens
tcagcagaggtgcggggtttgagtct

SEQ ID NO: 11721 - DNA, 26 bp, Homo sapiens
cagcagaggtgcggggtttgagtctc

SEQ ID NO: 11722 - DNA, 26 bp, Homo sapiens
agcagaggtgcggggtttgagtctca

SEQ ID NO: 11723 - DNA, 26 bp, Homo sapiens
gcagaggtgcggggtttgagtctcag

SEQ ID NO: 11724 - DNA, 26 bp, Homo sapiens
cagaggtgcggggtttgagtctcaga

SEQ ID NO: 11725 - DNA, 26 bp, Homo sapiens
agaggtgcggggtttgagtctcagag

SEQ ID NO: 11726 - DNA, 26 bp, Homo sapiens
gaggtgcggggtttgagtctcagaga

SEQ ID NO: 11727 - DNA, 26 bp, Homo sapiens
aggtgcggggtttgagtctcagagat

SEQ ID NO: 11728 - DNA, 26 bp, Homo sapiens
ggtgcggggtttgagtctcagagatg

SEQ ID NO: 11729 - DNA, 26 bp, Homo sapiens
gtgcggggtttgagtctcagagatgc

SEQ ID NO: 11730 - DNA, 26 bp, Homo sapiens
tgcggggtttgagtctcagagatgcc

SEQ ID NO: 11731 - DNA, 26 bp, Homo sapiens
gcggggtttgagtctcagagatgccc

SEQ ID NO: 11732 - DNA, 26 bp, Homo sapiens
cggggtttgagtctcagagatgcccg

SEQ ID NO: 11733 - DNA, 26 bp, Homo sapiens
ggggtttgagtctcagagatgcccgg

SEQ ID NO: 11734 - DNA, 26 bp, Homo sapiens
gggtttgagtctcagagatgcccgga

SEQ ID NO: 11735 - DNA, 26 bp, Homo sapiens
ggtttgagtctcagagatgcccggaa

SEQ ID NO: 11736 - DNA, 26 bp, Homo sapiens
gtttgagtctcagagatgcccggaag

SEQ ID NO: 11737 - DNA, 26 bp, Homo sapiens
tttgagtctcagagatgcccggaagc

SEQ ID NO: 11738 - DNA, 26 bp, Homo sapiens
ttgagtctcagagatgcccggaagcg

SEQ ID NO: 11739 - DNA, 26 bp, Homo sapiens
tgagtctcagagatgcccggaagcgg

SEQ ID NO: 11740 - DNA, 26 bp, Homo sapiens
gagtctcagagatgcccggaagcggg

SEQ ID NO: 11741 - DNA, 26 bp, Homo sapiens
agtctcagagatgcccggaagcgggt

SEQ ID NO: 11742 - DNA, 26 bp, Homo sapiens
gtctcagagatgcccggaagcgggtg

SEQ ID NO: 11743 - DNA, 26 bp, Homo sapiens
tctcagagatgcccggaagcgggtgc

SEQ ID NO: 11744 - DNA, 26 bp, Homo sapiens
ctcagagatgcccggaagcgggtgcg

SEQ ID NO: 11745 - DNA, 26 bp, Homo sapiens
tcagagatgcccggaagcgggtgcgg

SEQ ID NO: 11746 - DNA, 26 bp, Homo sapiens
cagagatgcccggaagcgggtgcggt

SEQ ID NO: 11747 - DNA, 26 bp, Homo sapiens
agagatgcccggaagcgggtgcggtc

SEQ ID NO: 11748 - DNA, 26 bp, Homo sapiens
gagatgcccggaagcgggtgcggtca

SEQ ID NO: 11749 - DNA, 26 bp, Homo sapiens
agatgcccggaagcgggtgcggtcat

SEQ ID NO: 11750 - DNA, 26 bp, Homo sapiens
gatgcccggaagcgggtgcggtcatt

SEQ ID NO: 11751 - DNA, 26 bp, Homo sapiens
atgcccggaagcgggtgcggtcattg

SEQ ID NO: 11752 - DNA, 26 bp, Homo sapiens
tgcccggaagcgggtgcggtcattga

SEQ ID NO: 11753 - DNA, 26 bp, Homo sapiens
gcccggaagcgggtgcggtcattgaa

SEQ ID NO: 11754 - DNA, 26 bp, Homo sapiens
cccggaagcgggtgcggtcattgaag

SEQ ID NO: 11755 - DNA, 26 bp, Homo sapiens
ccggaagcgggtgcggtcattgaagc

SEQ ID NO: 11756 - DNA, 26 bp, Homo sapiens
cggaagcgggtgcggtcattgaagct

SEQ ID NO: 11757 - DNA, 26 bp, Homo sapiens
ggaagcgggtgcggtcattgaagctc

SEQ ID NO: 11758 - DNA, 26 bp, Homo sapiens
gaagcgggtgcggtcattgaagctcc

SEQ ID NO: 11759 - DNA, 26 bp, Homo sapiens
aagcgggtgcggtcattgaagctcca

SEQ ID NO: 11760 - DNA, 26 bp, Homo sapiens
agcgggtgcggtcattgaagctccag

SEQ ID NO: 11761 - DNA, 26 bp, Homo sapiens
gcgggtgcggtcattgaagctccagc

SEQ ID NO: 11762 - DNA, 26 bp, Homo sapiens
cgggtgcggtcattgaagctccagct

SEQ ID NO: 11763 - DNA, 26 bp, Homo sapiens
gggtgcggtcattgaagctccagctc

SEQ ID NO: 11764 - DNA, 26 bp, Homo sapiens
ggtgcggtcattgaagctccagctct

SEQ ID NO: 11765 - DNA, 26 bp, Homo sapiens
gtgcggtcattgaagctccagctctt

SEQ ID NO: 11766 - DNA, 26 bp, Homo sapiens
tgcggtcattgaagctccagctcttt

SEQ ID NO: 11767 - DNA, 26 bp, Homo sapiens
gcggtcattgaagctccagctctttt

SEQ ID NO: 11768 - DNA, 26 bp, Homo sapiens
cggtcattgaagctccagctcttttg

SEQ ID NO: 11769 - DNA, 26 bp, Homo sapiens
ggtcattgaagctccagctcttttgc

SEQ ID NO: 11770 - DNA, 26 bp, Homo sapiens
gtcattgaagctccagctcttttgca

SEQ ID NO: 11771 - DNA, 26 bp, Homo sapiens
tcattgaagctccagctcttttgcac

SEQ ID NO: 11772 - DNA, 26 bp, Homo sapiens
cattgaagctccagctcttttgcacc

SEQ ID NO: 11773 - DNA, 26 bp, Homo sapiens
attgaagctccagctcttttgcacct

SEQ ID NO: 11774 - DNA, 26 bp, Homo sapiens
ttgaagctccagctcttttgcacctt

SEQ ID NO: 11775 - DNA, 26 bp, Homo sapiens
tgaagctccagctcttttgcaccttg

SEQ ID NO: 11776 - DNA, 26 bp, Homo sapiens
gaagctccagctcttttgcaccttgg

SEQ ID NO: 11777 - DNA, 26 bp, Homo sapiens
aagctccagctcttttgcaccttggt

SEQ ID NO: 11778 - DNA, 26 bp, Homo sapiens
agctccagctcttttgcaccttggtg

SEQ ID NO: 11779 - DNA, 26 bp, Homo sapiens
gctccagctcttttgcaccttggtgg

SEQ ID NO: 11780 - DNA, 26 bp, Homo sapiens
ctccagctcttttgcaccttggtggg

SEQ ID NO: 11781 - DNA, 26 bp, Homo sapiens
tccagctcttttgcaccttggtgggg

SEQ ID NO: 11782 - DNA, 26 bp, Homo sapiens
ccagctcttttgcaccttggtggggc

SEQ ID NO: 11783 - DNA, 26 bp, Homo sapiens
cagctcttttgcaccttggtggggct

SEQ ID NO: 11784 - DNA, 26 bp, Homo sapiens
agctcttttgcaccttggtggggctg

SEQ ID NO: 11785 - DNA, 26 bp, Homo sapiens
gctcttttgcaccttggtggggctgg

SEQ ID NO: 11786 - DNA, 26 bp, Homo sapiens
ctcttttgcaccttggtggggctggt

SEQ ID NO: 11787 - DNA, 26 bp, Homo sapiens
tcttttgcaccttggtggggctggtg

SEQ ID NO: 11788 - DNA, 26 bp, Homo sapiens
cttttgcaccttggtggggctggtgg

SEQ ID NO: 11789 - DNA, 26 bp, Homo sapiens
ttttgcaccttggtggggctggtggc

SEQ ID NO: 11790 - DNA, 26 bp, Homo sapiens
tttgcaccttggtggggctggtggcc

SEQ ID NO: 11791 - DNA, 26 bp, Homo sapiens
ttgcaccttggtggggctggtggcct

SEQ ID NO: 11792 - DNA, 26 bp, Homo sapiens
tgcaccttggtggggctggtggcctc

SEQ ID NO: 11793 - DNA, 26 bp, Homo sapiens
gcaccttggtggggctggtggcctca

SEQ ID NO: 11794 - DNA, 26 bp, Homo sapiens
caccttggtggggctggtggcctcac

SEQ ID NO: 11795 - DNA, 26 bp, Homo sapiens
accttggtggggctggtggcctcacc

SEQ ID NO: 11796 - DNA, 26 bp, Homo sapiens
ccttggtggggctggtggcctcaccc

SEQ ID NO: 11797 - DNA, 26 bp, Homo sapiens
cttggtggggctggtggcctcaccca

SEQ ID NO: 11798 - DNA, 26 bp, Homo sapiens
ttggtggggctggtggcctcacccac

SEQ ID NO: 11799 - DNA, 26 bp, Homo sapiens
tggtggggctggtggcctcacccacc

SEQ ID NO: 11800 - DNA, 26 bp, Homo sapiens
ggtggggctggtggcctcacccacct

SEQ ID NO: 11801 - DNA, 26 bp, Homo sapiens
gtggggctggtggcctcacccacctg

SEQ ID NO: 11802 - DNA, 26 bp, Homo sapiens
tggggctggtggcctcacccacctgc

SEQ ID NO: 11803 - DNA, 26 bp, Homo sapiens
ggggctggtggcctcacccacctgct

SEQ ID NO: 11804 - DNA, 26 bp, Homo sapiens
gggctggtggcctcacccacctgctc

SEQ ID NO: 11805 - DNA, 26 bp, Homo sapiens
ggctggtggcctcacccacctgctcg

SEQ ID NO: 11806 - DNA, 26 bp, Homo sapiens
gctggtggcctcacccacctgctcgc

SEQ ID NO: 11807 - DNA, 26 bp, Homo sapiens
ctggtggcctcacccacctgctcgct

SEQ ID NO: 11808 - DNA, 26 bp, Homo sapiens
tggtggcctcacccacctgctcgctg

SEQ ID NO: 11809 - DNA, 26 bp, Homo sapiens
ggtggcctcacccacctgctcgctgc

SEQ ID NO: 11810 - DNA, 26 bp, Homo sapiens
gtggcctcacccacctgctcgctgct

SEQ ID NO: 11811 - DNA, 26 bp, Homo sapiens
tggcctcacccacctgctcgctgctt

SEQ ID NO: 11812 - DNA, 26 bp, Homo sapiens
ggcctcacccacctgctcgctgcttg

SEQ ID NO: 11813 - DNA, 26 bp, Homo sapiens
gcctcacccacctgctcgctgcttgg

SEQ ID NO: 11814 - DNA, 26 bp, Homo sapiens
cctcacccacctgctcgctgcttggg

SEQ ID NO: 11815 - DNA, 26 bp, Homo sapiens
ctcacccacctgctcgctgcttgggg

SEQ ID NO: 11816 - DNA, 26 bp, Homo sapiens
tcacccacctgctcgctgcttgggga

SEQ ID NO: 11817 - DNA, 26 bp, Homo sapiens
cacccacctgctcgctgcttggggag

SEQ ID NO: 11818 - DNA, 26 bp, Homo sapiens
acccacctgctcgctgcttggggagg

SEQ ID NO: 11819 - DNA, 26 bp, Homo sapiens
cccacctgctcgctgcttggggaggt

SEQ ID NO: 11820 - DNA, 26 bp, Homo sapiens
ccacctgctcgctgcttggggaggtg

SEQ ID NO: 11821 - DNA, 26 bp, Homo sapiens
cacctgctcgctgcttggggaggtgg

SEQ ID NO: 11822 - DNA, 26 bp, Homo sapiens
acctgctcgctgcttggggaggtggg

SEQ ID NO: 11823 - DNA, 26 bp, Homo sapiens
cctgctcgctgcttggggaggtgggc

SEQ ID NO: 11824 - DNA, 26 bp, Homo sapiens
ctgctcgctgcttggggaggtgggca

SEQ ID NO: 11825 - DNA, 26 bp, Homo sapiens
tgctcgctgcttggggaggtgggcat

SEQ ID NO: 11826 - DNA, 26 bp, Homo sapiens
gctcgctgcttggggaggtgggcatt

SEQ ID NO: 11827 - DNA, 26 bp, Homo sapiens
ctcgctgcttggggaggtgggcattg

SEQ ID NO: 11828 - DNA, 26 bp, Homo sapiens
tcgctgcttggggaggtgggcattgt

SEQ ID NO: 11829 - DNA, 26 bp, Homo sapiens
cgctgcttggggaggtgggcattgtt

SEQ ID NO: 11830 - DNA, 26 bp, Homo sapiens
gctgcttggggaggtgggcattgttg

SEQ ID NO: 11831 - DNA, 26 bp, Homo sapiens
ctgcttggggaggtgggcattgttgg

SEQ ID NO: 11832 - DNA, 26 bp, Homo sapiens
tgcttggggaggtgggcattgttgga

SEQ ID NO: 11833 - DNA, 26 bp, Homo sapiens
gcttggggaggtgggcattgttggag

SEQ ID NO: 11834 - DNA, 26 bp, Homo sapiens
cttggggaggtgggcattgttggagg

SEQ ID NO: 11835 - DNA, 26 bp, Homo sapiens
ttggggaggtgggcattgttggaggt

SEQ ID NO: 11836 - DNA, 26 bp, Homo sapiens
tggggaggtgggcattgttggaggtg

SEQ ID NO: 11837 - DNA, 26 bp, Homo sapiens
ggggaggtgggcattgttggaggtgc

SEQ ID NO: 11838 - DNA, 26 bp, Homo sapiens
gggaggtgggcattgttggaggtgcc

SEQ ID NO: 11839 - DNA, 26 bp, Homo sapiens
ggaggtgggcattgttggaggtgcca

SEQ ID NO: 11840 - DNA, 26 bp, Homo sapiens
gaggtgggcattgttggaggtgccag

SEQ ID NO: 11841 - DNA, 26 bp, Homo sapiens
aggtgggcattgttggaggtgccaga

SEQ ID NO: 11842 - DNA, 26 bp, Homo sapiens
ggtgggcattgttggaggtgccagat

SEQ ID NO: 11843 - DNA, 26 bp, Homo sapiens
gtgggcattgttggaggtgccagatg

SEQ ID NO: 11844 - DNA, 26 bp, Homo sapiens
tgggcattgttggaggtgccagatgc

SEQ ID NO: 11845 - DNA, 26 bp, Homo sapiens
gggcattgttggaggtgccagatgct

SEQ ID NO: 11846 - DNA, 26 bp, Homo sapiens
ggcattgttggaggtgccagatgctg

SEQ ID NO: 11847 - DNA, 26 bp, Homo sapiens
gcattgttggaggtgccagatgctgc

SEQ ID NO: 11848 - DNA, 26 bp, Homo sapiens
cattgttggaggtgccagatgctgct

SEQ ID NO: 11849 - DNA, 26 bp, Homo sapiens
attgttggaggtgccagatgctgctt

SEQ ID NO: 11850 - DNA, 26 bp, Homo sapiens
ttgttggaggtgccagatgctgcttg

SEQ ID NO: 11851 - DNA, 26 bp, Homo sapiens
tgttggaggtgccagatgctgcttgg

SEQ ID NO: 11852 - DNA, 26 bp, Homo sapiens
gttggaggtgccagatgctgcttgga

SEQ ID NO: 11853 - DNA, 26 bp, Homo sapiens
ttggaggtgccagatgctgcttggaa

SEQ ID NO: 11854 - DNA, 26 bp, Homo sapiens
tggaggtgccagatgctgcttggaag

SEQ ID NO: 11855 - DNA, 26 bp, Homo sapiens
ggaggtgccagatgctgcttggaagg

SEQ ID NO: 11856 - DNA, 26 bp, Homo sapiens
gaggtgccagatgctgcttggaagga

SEQ ID NO: 11857 - DNA, 26 bp, Homo sapiens
aggtgccagatgctgcttggaaggac

SEQ ID NO: 11858 - DNA, 26 bp, Homo sapiens
ggtgccagatgctgcttggaaggacc

SEQ ID NO: 11859 - DNA, 26 bp, Homo sapiens
gtgccagatgctgcttggaaggaccc

SEQ ID NO: 11860 - DNA, 26 bp, Homo sapiens
tgccagatgctgcttggaaggacccg

SEQ ID NO: 11861 - DNA, 26 bp, Homo sapiens
gccagatgctgcttggaaggacccgt

SEQ ID NO: 11862 - DNA, 26 bp, Homo sapiens
ccagatgctgcttggaaggacccgtc

SEQ ID NO: 11863 - DNA, 26 bp, Homo sapiens
cagatgctgcttggaaggacccgtcc

SEQ ID NO: 11864 - DNA, 26 bp, Homo sapiens
agatgctgcttggaaggacccgtccg

SEQ ID NO: 11865 - DNA, 26 bp, Homo sapiens
gatgctgcttggaaggacccgtccgc

SEQ ID NO: 11866 - DNA, 26 bp, Homo sapiens
atgctgcttggaaggacccgtccgcc

SEQ ID NO: 11867 - DNA, 26 bp, Homo sapiens
tgctgcttggaaggacccgtccgccg

SEQ ID NO: 11868 - DNA, 26 bp, Homo sapiens
gctgcttggaaggacccgtccgccgc

SEQ ID NO: 11869 - DNA, 26 bp, Homo sapiens
ctgcttggaaggacccgtccgccgct

SEQ ID NO: 11870 - DNA, 26 bp, Homo sapiens
tgcttggaaggacccgtccgccgctg

SEQ ID NO: 11871 - DNA, 26 bp, Homo sapiens
gcttggaaggacccgtccgccgctgg

SEQ ID NO: 11872 - DNA, 26 bp, Homo sapiens
cttggaaggacccgtccgccgctggg

SEQ ID NO: 11873 - DNA, 26 bp, Homo sapiens
ttggaaggacccgtccgccgctggga

SEQ ID NO: 11874 - DNA, 26 bp, Homo sapiens
tggaaggacccgtccgccgctgggag

SEQ ID NO: 11875 - DNA, 26 bp, Homo sapiens
ggaaggacccgtccgccgctgggagc

SEQ ID NO: 11876 - DNA, 26 bp, Homo sapiens
gaaggacccgtccgccgctgggagct

SEQ ID NO: 11877 - DNA, 26 bp, Homo sapiens
aaggacccgtccgccgctgggagctg

SEQ ID NO: 11878 - DNA, 26 bp, Homo sapiens
aggacccgtccgccgctgggagctgc

SEQ ID NO: 11879 - DNA, 26 bp, Homo sapiens
ggacccgtccgccgctgggagctgcc

SEQ ID NO: 11880 - DNA, 26 bp, Homo sapiens
gacccgtccgccgctgggagctgccc

SEQ ID NO: 11881 - DNA, 26 bp, Homo sapiens
acccgtccgccgctgggagctgccca

SEQ ID NO: 11882 - DNA, 26 bp, Homo sapiens
cccgtccgccgctgggagctgcccat

SEQ ID NO: 11883 - DNA, 26 bp, Homo sapiens
ccgtccgccgctgggagctgcccatg

SEQ ID NO: 11884 - DNA, 26 bp, Homo sapiens
cgtccgccgctgggagctgcccatgc

SEQ ID NO: 11885 - DNA, 26 bp, Homo sapiens
gtccgccgctgggagctgcccatgcg

SEQ ID NO: 11886 - DNA, 26 bp, Homo sapiens
tccgccgctgggagctgcccatgcgg

SEQ ID NO: 11887 - DNA, 26 bp, Homo sapiens
ccgccgctgggagctgcccatgcgga

SEQ ID NO: 11888 - DNA, 26 bp, Homo sapiens
cgccgctgggagctgcccatgcggat

SEQ ID NO: 11889 - DNA, 26 bp, Homo sapiens
gccgctgggagctgcccatgcggatg

SEQ ID NO: 11890 - DNA, 26 bp, Homo sapiens
ccgctgggagctgcccatgcggatgc

SEQ ID NO: 11891 - DNA, 26 bp, Homo sapiens
cgctgggagctgcccatgcggatgcg

SEQ ID NO: 11892 - DNA, 26 bp, Homo sapiens
gctgggagctgcccatgcggatgcgg

SEQ ID NO: 11893 - DNA, 26 bp, Homo sapiens
ctgggagctgcccatgcggatgcggt

SEQ ID NO: 11894 - DNA, 26 bp, Homo sapiens
tgggagctgcccatgcggatgcggtc

SEQ ID NO: 11895 - DNA, 26 bp, Homo sapiens
gggagctgcccatgcggatgcggtct

SEQ ID NO: 11896 - DNA, 26 bp, Homo sapiens
ggagctgcccatgcggatgcggtctt

SEQ ID NO: 11897 - DNA, 26 bp, Homo sapiens
gagctgcccatgcggatgcggtcttt

SEQ ID NO: 11898 - DNA, 26 bp, Homo sapiens
agctgcccatgcggatgcggtctttg

SEQ ID NO: 11899 - DNA, 26 bp, Homo sapiens
gctgcccatgcggatgcggtctttga

SEQ ID NO: 11900 - DNA, 26 bp, Homo sapiens
ctgcccatgcggatgcggtctttgat

SEQ ID NO: 11901 - DNA, 26 bp, Homo sapiens
tgcccatgcggatgcggtctttgatg

SEQ ID NO: 11902 - DNA, 26 bp, Homo sapiens
gcccatgcggatgcggtctttgatgc

SEQ ID NO: 11903 - DNA, 26 bp, Homo sapiens
cccatgcggatgcggtctttgatgcc

SEQ ID NO: 11904 - DNA, 26 bp, Homo sapiens
ccatgcggatgcggtctttgatgccc

SEQ ID NO: 11905 - DNA, 26 bp, Homo sapiens
catgcggatgcggtctttgatgccca

SEQ ID NO: 11906 - DNA, 26 bp, Homo sapiens
atgcggatgcggtctttgatgcccat

SEQ ID NO: 11907 - DNA, 26 bp, Homo sapiens
tgcggatgcggtctttgatgcccatc

SEQ ID NO: 11908 - DNA, 26 bp, Homo sapiens
gcggatgcggtctttgatgcccatcc

SEQ ID NO: 11909 - DNA, 26 bp, Homo sapiens
cggatgcggtctttgatgcccatccg

SEQ ID NO: 11910 - DNA, 26 bp, Homo sapiens
ggatgcggtctttgatgcccatccgg

SEQ ID NO: 11911 - DNA, 26 bp, Homo sapiens
gatgcggtctttgatgcccatccggc

SEQ ID NO: 11912 - DNA, 26 bp, Homo sapiens
atgcggtctttgatgcccatccggct

SEQ ID NO: 11913 - DNA, 26 bp, Homo sapiens
tgcggtctttgatgcccatccggctg

SEQ ID NO: 11914 - DNA, 26 bp, Homo sapiens
gcggtctttgatgcccatccggctgc

SEQ ID NO: 11915 - DNA, 26 bp, Homo sapiens
cggtctttgatgcccatccggctgct

SEQ ID NO: 11916 - DNA, 26 bp, Homo sapiens
ggtctttgatgcccatccggctgctt

SEQ ID NO: 11917 - DNA, 26 bp, Homo sapiens
gtctttgatgcccatccggctgcttt

SEQ ID NO: 11918 - DNA, 26 bp, Homo sapiens
tctttgatgcccatccggctgctttc

SEQ ID NO: 11919 - DNA, 26 bp, Homo sapiens
ctttgatgcccatccggctgctttcc

SEQ ID NO: 11920 - DNA, 26 bp, Homo sapiens
tttgatgcccatccggctgctttccc

SEQ ID NO: 11921 - DNA, 26 bp, Homo sapiens
ttgatgcccatccggctgctttcccc

SEQ ID NO: 11922 - DNA, 26 bp, Homo sapiens
tgatgcccatccggctgctttcccca

SEQ ID NO: 11923 - DNA, 26 bp, Homo sapiens
gatgcccatccggctgctttccccag

SEQ ID NO: 11924 - DNA, 26 bp, Homo sapiens
atgcccatccggctgctttccccagg

SEQ ID NO: 11925 - DNA, 26 bp, Homo sapiens
tgcccatccggctgctttccccaggg

SEQ ID NO: 11926 - DNA, 26 bp, Homo sapiens
gcccatccggctgctttccccagggc

SEQ ID NO: 11927 - DNA, 26 bp, Homo sapiens
cccatccggctgctttccccagggca

SEQ ID NO: 11928 - DNA, 26 bp, Homo sapiens
ccatccggctgctttccccagggcag

SEQ ID NO: 11929 - DNA, 26 bp, Homo sapiens
catccggctgctttccccagggcaga

SEQ ID NO: 11930 - DNA, 26 bp, Homo sapiens
atccggctgctttccccagggcagaa

SEQ ID NO: 11931 - DNA, 26 bp, Homo sapiens
tccggctgctttccccagggcagaag

SEQ ID NO: 11932 - DNA, 26 bp, Homo sapiens
ccggctgctttccccagggcagaagg

SEQ ID NO: 11933 - DNA, 26 bp, Homo sapiens
cggctgctttccccagggcagaagga

SEQ ID NO: 11934 - DNA, 26 bp, Homo sapiens
ggctgctttccccagggcagaaggag

SEQ ID NO: 11935 - DNA, 26 bp, Homo sapiens
gctgctttccccagggcagaaggagg

SEQ ID NO: 11936 - DNA, 26 bp, Homo sapiens
ctgctttccccagggcagaaggaggt

SEQ ID NO: 11937 - DNA, 26 bp, Homo sapiens
tgctttccccagggcagaaggaggtg

SEQ ID NO: 11938 - DNA, 26 bp, Homo sapiens
gctttccccagggcagaaggaggtgc

SEQ ID NO: 11939 - DNA, 26 bp, Homo sapiens
ctttccccagggcagaaggaggtgct

SEQ ID NO: 11940 - DNA, 26 bp, Homo sapiens
tttccccagggcagaaggaggtgctg

SEQ ID NO: 11941 - DNA, 26 bp, Homo sapiens
ttccccagggcagaaggaggtgctgc

SEQ ID NO: 11942 - DNA, 26 bp, Homo sapiens
tccccagggcagaaggaggtgctgcc

SEQ ID NO: 11943 - DNA, 26 bp, Homo sapiens
ccccagggcagaaggaggtgctgccc

SEQ ID NO: 11944 - DNA, 26 bp, Homo sapiens
cccagggcagaaggaggtgctgcccg

SEQ ID NO: 11945 - DNA, 26 bp, Homo sapiens
ccagggcagaaggaggtgctgcccgg

SEQ ID NO: 11946 - DNA, 26 bp, Homo sapiens
cagggcagaaggaggtgctgcccggc

SEQ ID NO: 11947 - DNA, 26 bp, Homo sapiens
agggcagaaggaggtgctgcccggcc

SEQ ID NO: 11948 - DNA, 26 bp, Homo sapiens
gggcagaaggaggtgctgcccggccg

SEQ ID NO: 11949 - DNA, 26 bp, Homo sapiens
ggcagaaggaggtgctgcccggccgg

SEQ ID NO: 11950 - DNA, 26 bp, Homo sapiens
gcagaaggaggtgctgcccggccggt

SEQ ID NO: 11951 - DNA, 26 bp, Homo sapiens
cagaaggaggtgctgcccggccggtg

SEQ ID NO: 11952 - DNA, 26 bp, Homo sapiens
agaaggaggtgctgcccggccggtgg

SEQ ID NO: 11953 - DNA, 26 bp, Homo sapiens
gaaggaggtgctgcccggccggtggc

SEQ ID NO: 11954 - DNA, 26 bp, Homo sapiens
aaggaggtgctgcccggccggtggca

SEQ ID NO: 11955 - DNA, 26 bp, Homo sapiens
aggaggtgctgcccggccggtggcag

SEQ ID NO: 11956 - DNA, 26 bp, Homo sapiens
ggaggtgctgcccggccggtggcagg

SEQ ID NO: 11957 - DNA, 26 bp, Homo sapiens
gaggtgctgcccggccggtggcaggt

SEQ ID NO: 11958 - DNA, 26 bp, Homo sapiens
aggtgctgcccggccggtggcaggtg

SEQ ID NO: 11959 - DNA, 26 bp, Homo sapiens
ggtgctgcccggccggtggcaggtgg

SEQ ID NO: 11960 - DNA, 26 bp, Homo sapiens
gtgctgcccggccggtggcaggtggc

SEQ ID NO: 11961 - DNA, 26 bp, Homo sapiens
tgctgcccggccggtggcaggtggca

SEQ ID NO: 11962 - DNA, 26 bp, Homo sapiens
gctgcccggccggtggcaggtggcaa

SEQ ID NO: 11963 - DNA, 26 bp, Homo sapiens
ctgcccggccggtggcaggtggcaac

SEQ ID NO: 11964 - DNA, 26 bp, Homo sapiens
tgcccggccggtggcaggtggcaacg

SEQ ID NO: 11965 - DNA, 26 bp, Homo sapiens
gcccggccggtggcaggtggcaacgg

SEQ ID NO: 11966 - DNA, 26 bp, Homo sapiens
cccggccggtggcaggtggcaacggg

SEQ ID NO: 11967 - DNA, 26 bp, Homo sapiens
ccggccggtggcaggtggcaacgggc

SEQ ID NO: 11968 - DNA, 26 bp, Homo sapiens
cggccggtggcaggtggcaacgggcg

SEQ ID NO: 11969 - DNA, 26 bp, Homo sapiens
ggccggtggcaggtggcaacgggcgg

SEQ ID NO: 11970 - DNA, 26 bp, Homo sapiens
gccggtggcaggtggcaacgggcggg

SEQ ID NO: 11971 - DNA, 26 bp, Homo sapiens
ccggtggcaggtggcaacgggcgggt

SEQ ID NO: 11972 - DNA, 26 bp, Homo sapiens
cggtggcaggtggcaacgggcgggta

SEQ ID NO: 11973 - DNA, 26 bp, Homo sapiens
ggtggcaggtggcaacgggcgggtaa

SEQ ID NO: 11974 - DNA, 26 bp, Homo sapiens
gtggcaggtggcaacgggcgggtaac

SEQ ID NO: 11975 - DNA, 26 bp, Homo sapiens
tggcaggtggcaacgggcgggtaacg

SEQ ID NO: 11976 - DNA, 26 bp, Homo sapiens
ggcaggtggcaacgggcgggtaacgg

SEQ ID NO: 11977 - DNA, 26 bp, Homo sapiens
gcaggtggcaacgggcgggtaacggg

SEQ ID NO: 11978 - DNA, 26 bp, Homo sapiens
caggtggcaacgggcgggtaacggga

SEQ ID NO: 11979 - DNA, 26 bp, Homo sapiens
aggtggcaacgggcgggtaacgggag

SEQ ID NO: 11980 - DNA, 26 bp, Homo sapiens
ggtggcaacgggcgggtaacgggagg

SEQ ID NO: 11981 - DNA, 26 bp, Homo sapiens
gtggcaacgggcgggtaacgggaggg

SEQ ID NO: 11982 - DNA, 26 bp, Homo sapiens
tggcaacgggcgggtaacgggagggt

SEQ ID NO: 11983 - DNA, 26 bp, Homo sapiens
ggcaacgggcgggtaacgggagggtg

SEQ ID NO: 11984 - DNA, 26 bp, Homo sapiens
gcaacgggcgggtaacgggagggtgc

SEQ ID NO: 11985 - DNA, 26 bp, Homo sapiens
caacgggcgggtaacgggagggtgct

SEQ ID NO: 11986 - DNA, 26 bp, Homo sapiens
aacgggcgggtaacgggagggtgctc

SEQ ID NO: 11987 - DNA, 26 bp, Homo sapiens
acgggcgggtaacgggagggtgctcc

SEQ ID NO: 11988 - DNA, 26 bp, Homo sapiens
cgggcgggtaacgggagggtgctccg

SEQ ID NO: 11989 - DNA, 26 bp, Homo sapiens
gggcgggtaacgggagggtgctccgt

SEQ ID NO: 11990 - DNA, 26 bp, Homo sapiens
ggcgggtaacgggagggtgctccgtc

SEQ ID NO: 11991 - DNA, 26 bp, Homo sapiens
gcgggtaacgggagggtgctccgtcg

SEQ ID NO: 11992 - DNA, 26 bp, Homo sapiens
cgggtaacgggagggtgctccgtcgg

SEQ ID NO: 11993 - DNA, 26 bp, Homo sapiens
gggtaacgggagggtgctccgtcggg

SEQ ID NO: 11994 - DNA, 26 bp, Homo sapiens
ggtaacgggagggtgctccgtcgggt

SEQ ID NO: 11995 - DNA, 26 bp, Homo sapiens
gtaacgggagggtgctccgtcgggta

SEQ ID NO: 11996 - DNA, 26 bp, Homo sapiens
taacgggagggtgctccgtcgggtac

SEQ ID NO: 11997 - DNA, 26 bp, Homo sapiens
aacgggagggtgctccgtcgggtacc

SEQ ID NO: 11998 - DNA, 26 bp, Homo sapiens
acgggagggtgctccgtcgggtaccg

SEQ ID NO: 11999 - DNA, 26 bp, Homo sapiens
cgggagggtgctccgtcgggtaccgg

SEQ ID NO: 12000 - DNA, 26 bp, Homo sapiens
gggagggtgctccgtcgggtaccggc

SEQ ID NO: 12001 - DNA, 26 bp, Homo sapiens
ggagggtgctccgtcgggtaccggcg

SEQ ID NO: 12002 - DNA, 26 bp, Homo sapiens
gagggtgctccgtcgggtaccggcgc

SEQ ID NO: 12003 - DNA, 26 bp, Homo sapiens
agggtgctccgtcgggtaccggcgcc

SEQ ID NO: 12004 - DNA, 26 bp, Homo sapiens
gggtgctccgtcgggtaccggcgccc

SEQ ID NO: 12005 - DNA, 26 bp, Homo sapiens
ggtgctccgtcgggtaccggcgcccg

SEQ ID NO: 12006 - DNA, 26 bp, Homo sapiens
gtgctccgtcgggtaccggcgcccgc

SEQ ID NO: 12007 - DNA, 26 bp, Homo sapiens
tgctccgtcgggtaccggcgcccgcc

SEQ ID NO: 12008 - DNA, 26 bp, Homo sapiens
gctccgtcgggtaccggcgcccgccg

SEQ ID NO: 12009 - DNA, 26 bp, Homo sapiens
ctccgtcgggtaccggcgcccgccgc

SEQ ID NO: 12010 - DNA, 26 bp, Homo sapiens
tccgtcgggtaccggcgcccgccgca

SEQ ID NO: 12011 - DNA, 26 bp, Homo sapiens
ccgtcgggtaccggcgcccgccgcac

SEQ ID NO: 12012 - DNA, 26 bp, Homo sapiens
cgtcgggtaccggcgcccgccgcacc

SEQ ID NO: 12013 - DNA, 26 bp, Homo sapiens
gtcgggtaccggcgcccgccgcacct

SEQ ID NO: 12014 - DNA, 26 bp, Homo sapiens
tcgggtaccggcgcccgccgcacctc

SEQ ID NO: 12015 - DNA, 26 bp, Homo sapiens
cgggtaccggcgcccgccgcacctcc

SEQ ID NO: 12016 - DNA, 26 bp, Homo sapiens
gggtaccggcgcccgccgcacctcca

SEQ ID NO: 12017 - DNA, 26 bp, Homo sapiens
ggtaccggcgcccgccgcacctccag

SEQ ID NO: 12018 - DNA, 26 bp, Homo sapiens
gtaccggcgcccgccgcacctccagg

SEQ ID NO: 12019 - DNA, 26 bp, Homo sapiens
taccggcgcccgccgcacctccaggg

SEQ ID NO: 12020 - DNA, 26 bp, Homo sapiens
accggcgcccgccgcacctccagggg

SEQ ID NO: 12021 - DNA, 26 bp, Homo sapiens
ccggcgcccgccgcacctccaggggc

SEQ ID NO: 12022 - DNA, 26 bp, Homo sapiens
cggcgcccgccgcacctccaggggcc

SEQ ID NO: 12023 - DNA, 26 bp, Homo sapiens
ggcgcccgccgcacctccaggggccg

SEQ ID NO: 12024 - DNA, 26 bp, Homo sapiens
gcgcccgccgcacctccaggggccgt

SEQ ID NO: 12025 - DNA, 26 bp, Homo sapiens
cgcccgccgcacctccaggggccgta

SEQ ID NO: 12026 - DNA, 26 bp, Homo sapiens
gcccgccgcacctccaggggccgtag

SEQ ID NO: 12027 - DNA, 26 bp, Homo sapiens
cccgccgcacctccaggggccgtagg

SEQ ID NO: 12028 - DNA, 26 bp, Homo sapiens
ccgccgcacctccaggggccgtaggc

SEQ ID NO: 12029 - DNA, 26 bp, Homo sapiens
cgccgcacctccaggggccgtaggcc

SEQ ID NO: 12030 - DNA, 26 bp, Homo sapiens
gccgcacctccaggggccgtaggccc

SEQ ID NO: 12031 - DNA, 26 bp, Homo sapiens
ccgcacctccaggggccgtaggcccc

SEQ ID NO: 12032 - DNA, 26 bp, Homo sapiens
cgcacctccaggggccgtaggccccc

SEQ ID NO: 12033 - DNA, 26 bp, Homo sapiens
gcacctccaggggccgtaggccccca

SEQ ID NO: 12034 - DNA, 26 bp, Homo sapiens
cacctccaggggccgtaggcccccat

SEQ ID NO: 12035 - DNA, 26 bp, Homo sapiens
acctccaggggccgtaggcccccatt

SEQ ID NO: 12036 - DNA, 26 bp, Homo sapiens
cctccaggggccgtaggcccccattg

SEQ ID NO: 12037 - DNA, 26 bp, Homo sapiens
ctccaggggccgtaggcccccattgc

SEQ ID NO: 12038 - DNA, 26 bp, Homo sapiens
tccaggggccgtaggcccccattgcg

SEQ ID NO: 12039 - DNA, 26 bp, Homo sapiens
ccaggggccgtaggcccccattgcgg

SEQ ID NO: 12040 - DNA, 26 bp, Homo sapiens
caggggccgtaggcccccattgcggg

SEQ ID NO: 12041 - DNA, 26 bp, Homo sapiens
aggggccgtaggcccccattgcgggc

SEQ ID NO: 12042 - DNA, 26 bp, Homo sapiens
ggggccgtaggcccccattgcgggcc

SEQ ID NO: 12043 - DNA, 26 bp, Homo sapiens
gggccgtaggcccccattgcgggccc

SEQ ID NO: 12044 - DNA, 26 bp, Homo sapiens
ggccgtaggcccccattgcgggcccg

SEQ ID NO: 12045 - DNA, 26 bp, Homo sapiens
gccgtaggcccccattgcgggcccgt

SEQ ID NO: 12046 - DNA, 26 bp, Homo sapiens
ccgtaggcccccattgcgggcccgtt

SEQ ID NO: 12047 - DNA, 26 bp, Homo sapiens
cgtaggcccccattgcgggcccgttg

SEQ ID NO: 12048 - DNA, 26 bp, Homo sapiens
gtaggcccccattgcgggcccgttgc

SEQ ID NO: 12049 - DNA, 26 bp, Homo sapiens
taggcccccattgcgggcccgttgca

SEQ ID NO: 12050 - DNA, 26 bp, Homo sapiens
aggcccccattgcgggcccgttgcac

SEQ ID NO: 12051 - DNA, 26 bp, Homo sapiens
ggcccccattgcgggcccgttgcacg

SEQ ID NO: 12052 - DNA, 26 bp, Homo sapiens
gcccccattgcgggcccgttgcacgt

SEQ ID NO: 12053 - DNA, 26 bp, Homo sapiens
cccccattgcgggcccgttgcacgtg

SEQ ID NO: 12054 - DNA, 26 bp, Homo sapiens
ccccattgcgggcccgttgcacgtgc

SEQ ID NO: 12055 - DNA, 26 bp, Homo sapiens
cccattgcgggcccgttgcacgtgct

SEQ ID NO: 12056 - DNA, 26 bp, Homo sapiens
ccattgcgggcccgttgcacgtgctc

SEQ ID NO: 12057 - DNA, 26 bp, Homo sapiens
cattgcgggcccgttgcacgtgctca

SEQ ID NO: 12058 - DNA, 26 bp, Homo sapiens
attgcgggcccgttgcacgtgctcaa

SEQ ID NO: 12059 - DNA, 26 bp, Homo sapiens
ttgcgggcccgttgcacgtgctcaaa

SEQ ID NO: 12060 - DNA, 26 bp, Homo sapiens
tgcgggcccgttgcacgtgctcaaac

SEQ ID NO: 12061 - DNA, 26 bp, Homo sapiens
gcgggcccgttgcacgtgctcaaaca

SEQ ID NO: 12062 - DNA, 26 bp, Homo sapiens
cgggcccgttgcacgtgctcaaacaa

SEQ ID NO: 12063 - DNA, 26 bp, Homo sapiens
gggcccgttgcacgtgctcaaacaag

SEQ ID NO: 12064 - DNA, 26 bp, Homo sapiens
ggcccgttgcacgtgctcaaacaaga

SEQ ID NO: 12065 - DNA, 26 bp, Homo sapiens
gcccgttgcacgtgctcaaacaagag

SEQ ID NO: 12066 - DNA, 26 bp, Homo sapiens
cccgttgcacgtgctcaaacaagagg

SEQ ID NO: 12067 - DNA, 26 bp, Homo sapiens
ccgttgcacgtgctcaaacaagaggg

SEQ ID NO: 12068 - DNA, 26 bp, Homo sapiens
cgttgcacgtgctcaaacaagagggc

SEQ ID NO: 12069 - DNA, 26 bp, Homo sapiens
gttgcacgtgctcaaacaagagggcc

SEQ ID NO: 12070 - DNA, 26 bp, Homo sapiens
ttgcacgtgctcaaacaagagggcca

SEQ ID NO: 12071 - DNA, 26 bp, Homo sapiens
tgcacgtgctcaaacaagagggccag

SEQ ID NO: 12072 - DNA, 26 bp, Homo sapiens
gcacgtgctcaaacaagagggccagc

SEQ ID NO: 12073 - DNA, 26 bp, Homo sapiens
cacgtgctcaaacaagagggccagct

SEQ ID NO: 12074 - DNA, 26 bp, Homo sapiens
acgtgctcaaacaagagggccagctc

SEQ ID NO: 12075 - DNA, 26 bp, Homo sapiens
cgtgctcaaacaagagggccagctct

SEQ ID NO: 12076 - DNA, 26 bp, Homo sapiens
gtgctcaaacaagagggccagctctc

SEQ ID NO: 12077 - DNA, 26 bp, Homo sapiens
tgctcaaacaagagggccagctctct

SEQ ID NO: 12078 - DNA, 26 bp, Homo sapiens
gctcaaacaagagggccagctctctg

SEQ ID NO: 12079 - DNA, 26 bp, Homo sapiens
ctcaaacaagagggccagctctctga

SEQ ID NO: 12080 - DNA, 26 bp, Homo sapiens
tcaaacaagagggccagctctctgaa

SEQ ID NO: 12081 - DNA, 26 bp, Homo sapiens
caaacaagagggccagctctctgaag

SEQ ID NO: 12082 - DNA, 26 bp, Homo sapiens
aaacaagagggccagctctctgaagg

SEQ ID NO: 12083 - DNA, 26 bp, Homo sapiens
aacaagagggccagctctctgaagga

SEQ ID NO: 12084 - DNA, 26 bp, Homo sapiens
acaagagggccagctctctgaaggat

SEQ ID NO: 12085 - DNA, 26 bp, Homo sapiens
caagagggccagctctctgaaggatg

SEQ ID NO: 12086 - DNA, 26 bp, Homo sapiens
aagagggccagctctctgaaggatgg

SEQ ID NO: 12087 - DNA, 26 bp, Homo sapiens
agagggccagctctctgaaggatggg

SEQ ID NO: 12088 - DNA, 26 bp, Homo sapiens
gagggccagctctctgaaggatggga

SEQ ID NO: 12089 - DNA, 26 bp, Homo sapiens
agggccagctctctgaaggatgggag

SEQ ID NO: 12090 - DNA, 26 bp, Homo sapiens
gggccagctctctgaaggatgggagg

SEQ ID NO: 12091 - DNA, 26 bp, Homo sapiens
ggccagctctctgaaggatgggagga

SEQ ID NO: 12092 - DNA, 26 bp, Homo sapiens
gccagctctctgaaggatgggaggat

SEQ ID NO: 12093 - DNA, 26 bp, Homo sapiens
ccagctctctgaaggatgggaggata

SEQ ID NO: 12094 - DNA, 26 bp, Homo sapiens
cagctctctgaaggatgggaggatac

SEQ ID NO: 12095 - DNA, 26 bp, Homo sapiens
agctctctgaaggatgggaggatact

SEQ ID NO: 12096 - DNA, 26 bp, Homo sapiens
gctctctgaaggatgggaggatactg

SEQ ID NO: 12097 - DNA, 26 bp, Homo sapiens
ctctctgaaggatgggaggatactgt

SEQ ID NO: 12098 - DNA, 26 bp, Homo sapiens
tctctgaaggatgggaggatactgtc

SEQ ID NO: 12099 - DNA, 26 bp, Homo sapiens
ctctgaaggatgggaggatactgtca

SEQ ID NO: 12100 - DNA, 26 bp, Homo sapiens
tctgaaggatgggaggatactgtcat

SEQ ID NO: 12101 - DNA, 26 bp, Homo sapiens
ctgaaggatgggaggatactgtcata

SEQ ID NO: 12102 - DNA, 26 bp, Homo sapiens
tgaaggatgggaggatactgtcatag

SEQ ID NO: 12103 - DNA, 26 bp, Homo sapiens
gaaggatgggaggatactgtcatagt

SEQ ID NO: 12104 - DNA, 26 bp, Homo sapiens
aaggatgggaggatactgtcatagta

SEQ ID NO: 12105 - DNA, 26 bp, Homo sapiens
aggatgggaggatactgtcatagtag

SEQ ID NO: 12106 - DNA, 26 bp, Homo sapiens
ggatgggaggatactgtcatagtagt

SEQ ID NO: 12107 - DNA, 26 bp, Homo sapiens
gatgggaggatactgtcatagtagta

SEQ ID NO: 12108 - DNA, 26 bp, Homo sapiens
atgggaggatactgtcatagtagtac

SEQ ID NO: 12109 - DNA, 26 bp, Homo sapiens
tgggaggatactgtcatagtagtacc

SEQ ID NO: 12110 - DNA, 26 bp, Homo sapiens
gggaggatactgtcatagtagtacca

SEQ ID NO: 12111 - DNA, 26 bp, Homo sapiens
ggaggatactgtcatagtagtaccag

SEQ ID NO: 12112 - DNA, 26 bp, Homo sapiens
gaggatactgtcatagtagtaccagg

SEQ ID NO: 12113 - DNA, 26 bp, Homo sapiens
aggatactgtcatagtagtaccaggt

SEQ ID NO: 12114 - DNA, 26 bp, Homo sapiens
ggatactgtcatagtagtaccaggtg

SEQ ID NO: 12115 - DNA, 26 bp, Homo sapiens
gatactgtcatagtagtaccaggtgg

SEQ ID NO: 12116 - DNA, 26 bp, Homo sapiens
atactgtcatagtagtaccaggtggc

SEQ ID NO: 12117 - DNA, 26 bp, Homo sapiens
tactgtcatagtagtaccaggtggct

SEQ ID NO: 12118 - DNA, 26 bp, Homo sapiens
actgtcatagtagtaccaggtggctg

SEQ ID NO: 12119 - DNA, 26 bp, Homo sapiens
ctgtcatagtagtaccaggtggctgt

SEQ ID NO: 12120 - DNA, 26 bp, Homo sapiens
tgtcatagtagtaccaggtggctgtc

SEQ ID NO: 12121 - DNA, 26 bp, Homo sapiens
gtcatagtagtaccaggtggctgtca

SEQ ID NO: 12122 - DNA, 26 bp, Homo sapiens
tcatagtagtaccaggtggctgtcag

SEQ ID NO: 12123 - DNA, 26 bp, Homo sapiens
catagtagtaccaggtggctgtcagg

SEQ ID NO: 12124 - DNA, 26 bp, Homo sapiens
atagtagtaccaggtggctgtcaggt

SEQ ID NO: 12125 - DNA, 26 bp, Homo sapiens
tagtagtaccaggtggctgtcaggta

SEQ ID NO: 12126 - DNA, 26 bp, Homo sapiens
agtagtaccaggtggctgtcaggtag

SEQ ID NO: 12127 - DNA, 26 bp, Homo sapiens
gtagtaccaggtggctgtcaggtagg

SEQ ID NO: 12128 - DNA, 26 bp, Homo sapiens
tagtaccaggtggctgtcaggtaggc

SEQ ID NO: 12129 - DNA, 26 bp, Homo sapiens
agtaccaggtggctgtcaggtaggcc

SEQ ID NO: 12130 - DNA, 26 bp, Homo sapiens
gtaccaggtggctgtcaggtaggccc

SEQ ID NO: 12131 - DNA, 26 bp, Homo sapiens
taccaggtggctgtcaggtaggcccg

SEQ ID NO: 12132 - DNA, 26 bp, Homo sapiens
accaggtggctgtcaggtaggcccgg

SEQ ID NO: 12133 - DNA, 26 bp, Homo sapiens
ccaggtggctgtcaggtaggcccggc

SEQ ID NO: 12134 - DNA, 26 bp, Homo sapiens
caggtggctgtcaggtaggcccggct

SEQ ID NO: 12135 - DNA, 26 bp, Homo sapiens
aggtggctgtcaggtaggcccggctc

SEQ ID NO: 12136 - DNA, 26 bp, Homo sapiens
ggtggctgtcaggtaggcccggctca

SEQ ID NO: 12137 - DNA, 26 bp, Homo sapiens
gtggctgtcaggtaggcccggctcat

SEQ ID NO: 12138 - DNA, 26 bp, Homo sapiens
tggctgtcaggtaggcccggctcata

SEQ ID NO: 12139 - DNA, 26 bp, Homo sapiens
ggctgtcaggtaggcccggctcatat

SEQ ID NO: 12140 - DNA, 26 bp, Homo sapiens
gctgtcaggtaggcccggctcatatc

SEQ ID NO: 12141 - DNA, 26 bp, Homo sapiens
ctgtcaggtaggcccggctcatatcg

SEQ ID NO: 12142 - DNA, 26 bp, Homo sapiens
tgtcaggtaggcccggctcatatcgg

SEQ ID NO: 12143 - DNA, 26 bp, Homo sapiens
gtcaggtaggcccggctcatatcggt

SEQ ID NO: 12144 - DNA, 26 bp, Homo sapiens
tcaggtaggcccggctcatatcggtg

SEQ ID NO: 12145 - DNA, 26 bp, Homo sapiens
caggtaggcccggctcatatcggtgg

SEQ ID NO: 12146 - DNA, 26 bp, Homo sapiens
aggtaggcccggctcatatcggtgga

SEQ ID NO: 12147 - DNA, 26 bp, Homo sapiens
ggtaggcccggctcatatcggtggag

SEQ ID NO: 12148 - DNA, 26 bp, Homo sapiens
gtaggcccggctcatatcggtggagt

SEQ ID NO: 12149 - DNA, 26 bp, Homo sapiens
taggcccggctcatatcggtggagta

SEQ ID NO: 12150 - DNA, 26 bp, Homo sapiens
aggcccggctcatatcggtggagtac

SEQ ID NO: 12151 - DNA, 26 bp, Homo sapiens
ggcccggctcatatcggtggagtaca

SEQ ID NO: 12152 - DNA, 26 bp, Homo sapiens
gcccggctcatatcggtggagtacag

SEQ ID NO: 12153 - DNA, 26 bp, Homo sapiens
cccggctcatatcggtggagtacagg

SEQ ID NO: 12154 - DNA, 26 bp, Homo sapiens
ccggctcatatcggtggagtacaggc

SEQ ID NO: 12155 - DNA, 26 bp, Homo sapiens
cggctcatatcggtggagtacaggcg

SEQ ID NO: 12156 - DNA, 26 bp, Homo sapiens
ggctcatatcggtggagtacaggcgc

SEQ ID NO: 12157 - DNA, 26 bp, Homo sapiens
gctcatatcggtggagtacaggcgcc

SEQ ID NO: 12158 - DNA, 26 bp, Homo sapiens
ctcatatcggtggagtacaggcgcca

SEQ ID NO: 12159 - DNA, 26 bp, Homo sapiens
tcatatcggtggagtacaggcgccag

SEQ ID NO: 12160 - DNA, 26 bp, Homo sapiens
catatcggtggagtacaggcgccagg

SEQ ID NO: 12161 - DNA, 26 bp, Homo sapiens
atatcggtggagtacaggcgccaggc

SEQ ID NO: 12162 - DNA, 26 bp, Homo sapiens
tatcggtggagtacaggcgccaggca

SEQ ID NO: 12163 - DNA, 26 bp, Homo sapiens
atcggtggagtacaggcgccaggcag

SEQ ID NO: 12164 - DNA, 26 bp, Homo sapiens
tcggtggagtacaggcgccaggcagc

SEQ ID NO: 12165 - DNA, 26 bp, Homo sapiens
cggtggagtacaggcgccaggcagcc

SEQ ID NO: 12166 - DNA, 26 bp, Homo sapiens
ggtggagtacaggcgccaggcagcct

SEQ ID NO: 12167 - DNA, 26 bp, Homo sapiens
gtggagtacaggcgccaggcagcctg

SEQ ID NO: 12168 - DNA, 26 bp, Homo sapiens
tggagtacaggcgccaggcagcctgg

SEQ ID NO: 12169 - DNA, 26 bp, Homo sapiens
ggagtacaggcgccaggcagcctgga

SEQ ID NO: 12170 - DNA, 26 bp, Homo sapiens
gagtacaggcgccaggcagcctggat

SEQ ID NO: 12171 - DNA, 26 bp, Homo sapiens
agtacaggcgccaggcagcctggatg

SEQ ID NO: 12172 - DNA, 26 bp, Homo sapiens
gtacaggcgccaggcagcctggatga

SEQ ID NO: 12173 - DNA, 26 bp, Homo sapiens
tacaggcgccaggcagcctggatgag

SEQ ID NO: 12174 - DNA, 26 bp, Homo sapiens
acaggcgccaggcagcctggatgagg

SEQ ID NO: 12175 - DNA, 26 bp, Homo sapiens
caggcgccaggcagcctggatgaggt

SEQ ID NO: 12176 - DNA, 26 bp, Homo sapiens
aggcgccaggcagcctggatgaggtt

SEQ ID NO: 12177 - DNA, 26 bp, Homo sapiens
ggcgccaggcagcctggatgaggttg

SEQ ID NO: 12178 - DNA, 26 bp, Homo sapiens
gcgccaggcagcctggatgaggttgg

SEQ ID NO: 12179 - DNA, 26 bp, Homo sapiens
cgccaggcagcctggatgaggttggc

SEQ ID NO: 12180 - DNA, 26 bp, Homo sapiens
gccaggcagcctggatgaggttggct

SEQ ID NO: 12181 - DNA, 26 bp, Homo sapiens
ccaggcagcctggatgaggttggctg

SEQ ID NO: 12182 - DNA, 26 bp, Homo sapiens
caggcagcctggatgaggttggctgc

SEQ ID NO: 12183 - DNA, 26 bp, Homo sapiens
aggcagcctggatgaggttggctgcc

SEQ ID NO: 12184 - DNA, 26 bp, Homo sapiens
ggcagcctggatgaggttggctgccg

SEQ ID NO: 12185 - DNA, 26 bp, Homo sapiens
gcagcctggatgaggttggctgccgg

SEQ ID NO: 12186 - DNA, 26 bp, Homo sapiens
cagcctggatgaggttggctgccggc

SEQ ID NO: 12187 - DNA, 26 bp, Homo sapiens
agcctggatgaggttggctgccggca

SEQ ID NO: 12188 - DNA, 26 bp, Homo sapiens
gcctggatgaggttggctgccggcat

SEQ ID NO: 12189 - DNA, 26 bp, Homo sapiens
cctggatgaggttggctgccggcatc

SEQ ID NO: 12190 - DNA, 26 bp, Homo sapiens
ctggatgaggttggctgccggcatcc

SEQ ID NO: 12191 - DNA, 26 bp, Homo sapiens
tggatgaggttggctgccggcatcct

SEQ ID NO: 12192 - DNA, 26 bp, Homo sapiens
ggatgaggttggctgccggcatcctc

SEQ ID NO: 12193 - DNA, 26 bp, Homo sapiens
gatgaggttggctgccggcatcctcc

SEQ ID NO: 12194 - DNA, 26 bp, Homo sapiens
atgaggttggctgccggcatcctccg

SEQ ID NO: 12195 - DNA, 26 bp, Homo sapiens
tgaggttggctgccggcatcctccgc

SEQ ID NO: 12196 - DNA, 26 bp, Homo sapiens
gaggttggctgccggcatcctccgct

SEQ ID NO: 12197 - DNA, 26 bp, Homo sapiens
aggttggctgccggcatcctccgctt

SEQ ID NO: 12198 - DNA, 26 bp, Homo sapiens
ggttggctgccggcatcctccgcttc

SEQ ID NO: 12199 - DNA, 26 bp, Homo sapiens
gttggctgccggcatcctccgcttct

SEQ ID NO: 12200 - DNA, 26 bp, Homo sapiens
ttggctgccggcatcctccgcttctc

SEQ ID NO: 12201 - DNA, 26 bp, Homo sapiens
tggctgccggcatcctccgcttctcg

SEQ ID NO: 12202 - DNA, 26 bp, Homo sapiens
ggctgccggcatcctccgcttctcga

SEQ ID NO: 12203 - DNA, 26 bp, Homo sapiens
gctgccggcatcctccgcttctcgaa

SEQ ID NO: 12204 - DNA, 26 bp, Homo sapiens
ctgccggcatcctccgcttctcgaag

SEQ ID NO: 12205 - DNA, 26 bp, Homo sapiens
tgccggcatcctccgcttctcgaagt

SEQ ID NO: 12206 - DNA, 26 bp, Homo sapiens
gccggcatcctccgcttctcgaagtg

SEQ ID NO: 12207 - DNA, 26 bp, Homo sapiens
ccggcatcctccgcttctcgaagtgc

SEQ ID NO: 12208 - DNA, 26 bp, Homo sapiens
cggcatcctccgcttctcgaagtgct

SEQ ID NO: 12209 - DNA, 26 bp, Homo sapiens
ggcatcctccgcttctcgaagtgctt

SEQ ID NO: 12210 - DNA, 26 bp, Homo sapiens
gcatcctccgcttctcgaagtgcttc

SEQ ID NO: 12211 - DNA, 26 bp, Homo sapiens
catcctccgcttctcgaagtgcttct

SEQ ID NO: 12212 - DNA, 26 bp, Homo sapiens
atcctccgcttctcgaagtgcttctg

SEQ ID NO: 12213 - DNA, 26 bp, Homo sapiens
tcctccgcttctcgaagtgcttctgc

SEQ ID NO: 12214 - DNA, 26 bp, Homo sapiens
cctccgcttctcgaagtgcttctgcc

SEQ ID NO: 12215 - DNA, 26 bp, Homo sapiens
ctccgcttctcgaagtgcttctgccg

SEQ ID NO: 12216 - DNA, 26 bp, Homo sapiens
tccgcttctcgaagtgcttctgccgg

SEQ ID NO: 12217 - DNA, 26 bp, Homo sapiens
ccgcttctcgaagtgcttctgccggt

SEQ ID NO: 12218 - DNA, 26 bp, Homo sapiens
cgcttctcgaagtgcttctgccggtg

SEQ ID NO: 12219 - DNA, 26 bp, Homo sapiens
gcttctcgaagtgcttctgccggtgc

SEQ ID NO: 12220 - DNA, 26 bp, Homo sapiens
cttctcgaagtgcttctgccggtgct

SEQ ID NO: 12221 - DNA, 26 bp, Homo sapiens
ttctcgaagtgcttctgccggtgctg

SEQ ID NO: 12222 - DNA, 26 bp, Homo sapiens
tctcgaagtgcttctgccggtgctgc

SEQ ID NO: 12223 - DNA, 26 bp, Homo sapiens
ctcgaagtgcttctgccggtgctgct

SEQ ID NO: 12224 - DNA, 26 bp, Homo sapiens
tcgaagtgcttctgccggtgctgctc

SEQ ID NO: 12225 - DNA, 26 bp, Homo sapiens
cgaagtgcttctgccggtgctgctcc

SEQ ID NO: 12226 - DNA, 26 bp, Homo sapiens
gaagtgcttctgccggtgctgctcct

SEQ ID NO: 12227 - DNA, 26 bp, Homo sapiens
aagtgcttctgccggtgctgctcctg

SEQ ID NO: 12228 - DNA, 26 bp, Homo sapiens
agtgcttctgccggtgctgctcctgg

SEQ ID NO: 12229 - DNA, 26 bp, Homo sapiens
gtgcttctgccggtgctgctcctgga

SEQ ID NO: 12230 - DNA, 26 bp, Homo sapiens
tgcttctgccggtgctgctcctggac

SEQ ID NO: 12231 - DNA, 26 bp, Homo sapiens
gcttctgccggtgctgctcctggacc

SEQ ID NO: 12232 - DNA, 26 bp, Homo sapiens
cttctgccggtgctgctcctggacct

SEQ ID NO: 12233 - DNA, 26 bp, Homo sapiens
ttctgccggtgctgctcctggacctt

SEQ ID NO: 12234 - DNA, 26 bp, Homo sapiens
tctgccggtgctgctcctggaccttc

SEQ ID NO: 12235 - DNA, 26 bp, Homo sapiens
ctgccggtgctgctcctggaccttca

SEQ ID NO: 12236 - DNA, 26 bp, Homo sapiens
tgccggtgctgctcctggaccttcag

SEQ ID NO: 12237 - DNA, 26 bp, Homo sapiens
gccggtgctgctcctggaccttcagg

SEQ ID NO: 12238 - DNA, 26 bp, Homo sapiens
ccggtgctgctcctggaccttcaggg

SEQ ID NO: 12239 - DNA, 26 bp, Homo sapiens
cggtgctgctcctggaccttcagggc

SEQ ID NO: 12240 - DNA, 26 bp, Homo sapiens
ggtgctgctcctggaccttcagggca

SEQ ID NO: 12241 - DNA, 26 bp, Homo sapiens
gtgctgctcctggaccttcagggcaa

SEQ ID NO: 12242 - DNA, 26 bp, Homo sapiens
tgctgctcctggaccttcagggcaaa

SEQ ID NO: 12243 - DNA, 26 bp, Homo sapiens
gctgctcctggaccttcagggcaaag

SEQ ID NO: 12244 - DNA, 26 bp, Homo sapiens
ctgctcctggaccttcagggcaaagc

SEQ ID NO: 12245 - DNA, 26 bp, Homo sapiens
tgctcctggaccttcagggcaaagcc

SEQ ID NO: 12246 - DNA, 26 bp, Homo sapiens
gctcctggaccttcagggcaaagccg

SEQ ID NO: 12247 - DNA, 26 bp, Homo sapiens
ctcctggaccttcagggcaaagccgg

SEQ ID NO: 12248 - DNA, 26 bp, Homo sapiens
tcctggaccttcagggcaaagccgga

SEQ ID NO: 12249 - DNA, 26 bp, Homo sapiens
cctggaccttcagggcaaagccggag

SEQ ID NO: 12250 - DNA, 26 bp, Homo sapiens
ctggaccttcagggcaaagccggagc

SEQ ID NO: 12251 - DNA, 26 bp, Homo sapiens
tggaccttcagggcaaagccggagcc

SEQ ID NO: 12252 - DNA, 26 bp, Homo sapiens
ggaccttcagggcaaagccggagcct

SEQ ID NO: 12253 - DNA, 26 bp, Homo sapiens
gaccttcagggcaaagccggagccta

SEQ ID NO: 12254 - DNA, 26 bp, Homo sapiens
accttcagggcaaagccggagcctag

SEQ ID NO: 12255 - DNA, 26 bp, Homo sapiens
ccttcagggcaaagccggagcctagg

SEQ ID NO: 12256 - DNA, 26 bp, Homo sapiens
cttcagggcaaagccggagcctagga

SEQ ID NO: 12257 - DNA, 26 bp, Homo sapiens
ttcagggcaaagccggagcctaggat

SEQ ID NO: 12258 - DNA, 26 bp, Homo sapiens
tcagggcaaagccggagcctaggatg

SEQ ID NO: 12259 - DNA, 26 bp, Homo sapiens
cagggcaaagccggagcctaggatgc

SEQ ID NO: 12260 - DNA, 26 bp, Homo sapiens
agggcaaagccggagcctaggatgcc

SEQ ID NO: 12261 - DNA, 26 bp, Homo sapiens
gggcaaagccggagcctaggatgccg

SEQ ID NO: 12262 - DNA, 26 bp, Homo sapiens
ggcaaagccggagcctaggatgccgg

SEQ ID NO: 12263 - DNA, 26 bp, Homo sapiens
gcaaagccggagcctaggatgccggc

SEQ ID NO: 12264 - DNA, 26 bp, Homo sapiens
caaagccggagcctaggatgccggca

SEQ ID NO: 12265 - DNA, 26 bp, Homo sapiens
aaagccggagcctaggatgccggcag

SEQ ID NO: 12266 - DNA, 26 bp, Homo sapiens
aagccggagcctaggatgccggcagg

SEQ ID NO: 12267 - DNA, 26 bp, Homo sapiens
agccggagcctaggatgccggcaggc

SEQ ID NO: 12268 - DNA, 26 bp, Homo sapiens
gccggagcctaggatgccggcaggca

SEQ ID NO: 12269 - DNA, 26 bp, Homo sapiens
ccggagcctaggatgccggcaggcag

SEQ ID NO: 12270 - DNA, 26 bp, Homo sapiens
cggagcctaggatgccggcaggcagg

SEQ ID NO: 12271 - DNA, 26 bp, Homo sapiens
ggagcctaggatgccggcaggcaggg

SEQ ID NO: 12272 - DNA, 26 bp, Homo sapiens
gagcctaggatgccggcaggcagggc

SEQ ID NO: 12273 - DNA, 26 bp, Homo sapiens
agcctaggatgccggcaggcagggca

SEQ ID NO: 12274 - DNA, 26 bp, Homo sapiens
gcctaggatgccggcaggcagggcaa

SEQ ID NO: 12275 - DNA, 26 bp, Homo sapiens
cctaggatgccggcaggcagggcaaa

SEQ ID NO: 12276 - DNA, 26 bp, Homo sapiens
ctaggatgccggcaggcagggcaaag

SEQ ID NO: 12277 - DNA, 26 bp, Homo sapiens
taggatgccggcaggcagggcaaaga

SEQ ID NO: 12278 - DNA, 26 bp, Homo sapiens
aggatgccggcaggcagggcaaagaa

SEQ ID NO: 12279 - DNA, 26 bp, Homo sapiens
ggatgccggcaggcagggcaaagaaa

SEQ ID NO: 12280 - DNA, 26 bp, Homo sapiens
gatgccggcaggcagggcaaagaaag

SEQ ID NO: 12281 - DNA, 26 bp, Homo sapiens
atgccggcaggcagggcaaagaaaga

SEQ ID NO: 12282 - DNA, 26 bp, Homo sapiens
tgccggcaggcagggcaaagaaagag

SEQ ID NO: 12283 - DNA, 26 bp, Homo sapiens
gccggcaggcagggcaaagaaagaga

SEQ ID NO: 12284 - DNA, 26 bp, Homo sapiens
ccggcaggcagggcaaagaaagagat

SEQ ID NO: 12285 - DNA, 26 bp, Homo sapiens
cggcaggcagggcaaagaaagagatg

SEQ ID NO: 12286 - DNA, 26 bp, Homo sapiens
ggcaggcagggcaaagaaagagatgc

SEQ ID NO: 12287 - DNA, 26 bp, Homo sapiens
gcaggcagggcaaagaaagagatgcc

SEQ ID NO: 12288 - DNA, 26 bp, Homo sapiens
caggcagggcaaagaaagagatgccc

SEQ ID NO: 12289 - DNA, 26 bp, Homo sapiens
aggcagggcaaagaaagagatgccca

SEQ ID NO: 12290 - DNA, 26 bp, Homo sapiens
ggcagggcaaagaaagagatgcccag

SEQ ID NO: 12291 - DNA, 26 bp, Homo sapiens
gcagggcaaagaaagagatgcccagt

SEQ ID NO: 12292 - DNA, 26 bp, Homo sapiens
cagggcaaagaaagagatgcccagta

SEQ ID NO: 12293 - DNA, 26 bp, Homo sapiens
agggcaaagaaagagatgcccagtaa

SEQ ID NO: 12294 - DNA, 26 bp, Homo sapiens
gggcaaagaaagagatgcccagtaag

SEQ ID NO: 12295 - DNA, 26 bp, Homo sapiens
ggcaaagaaagagatgcccagtaagg

SEQ ID NO: 12296 - DNA, 26 bp, Homo sapiens
gcaaagaaagagatgcccagtaaggc

SEQ ID NO: 12297 - DNA, 26 bp, Homo sapiens
caaagaaagagatgcccagtaaggcg

SEQ ID NO: 12298 - DNA, 26 bp, Homo sapiens
aaagaaagagatgcccagtaaggcga

SEQ ID NO: 12299 - DNA, 26 bp, Homo sapiens
aagaaagagatgcccagtaaggcgaa

SEQ ID NO: 12300 - DNA, 26 bp, Homo sapiens
agaaagagatgcccagtaaggcgaag

SEQ ID NO: 12301 - DNA, 26 bp, Homo sapiens
gaaagagatgcccagtaaggcgaagc

SEQ ID NO: 12302 - DNA, 26 bp, Homo sapiens
aaagagatgcccagtaaggcgaagcc

SEQ ID NO: 12303 - DNA, 26 bp, Homo sapiens
aagagatgcccagtaaggcgaagcca

SEQ ID NO: 12304 - DNA, 26 bp, Homo sapiens
agagatgcccagtaaggcgaagccag

SEQ ID NO: 12305 - DNA, 26 bp, Homo sapiens
gagatgcccagtaaggcgaagccagc

SEQ ID NO: 12306 - DNA, 26 bp, Homo sapiens
agatgcccagtaaggcgaagccagca

SEQ ID NO: 12307 - DNA, 26 bp, Homo sapiens
gatgcccagtaaggcgaagccagcag

SEQ ID NO: 12308 - DNA, 26 bp, Homo sapiens
atgcccagtaaggcgaagccagcagc

SEQ ID NO: 12309 - DNA, 26 bp, Homo sapiens
tgcccagtaaggcgaagccagcagcc

SEQ ID NO: 12310 - DNA, 26 bp, Homo sapiens
gcccagtaaggcgaagccagcagcca

SEQ ID NO: 12311 - DNA, 26 bp, Homo sapiens
cccagtaaggcgaagccagcagccag

SEQ ID NO: 12312 - DNA, 26 bp, Homo sapiens
ccagtaaggcgaagccagcagccagg

SEQ ID NO: 12313 - DNA, 26 bp, Homo sapiens
cagtaaggcgaagccagcagccagga

SEQ ID NO: 12314 - DNA, 26 bp, Homo sapiens
agtaaggcgaagccagcagccaggac

SEQ ID NO: 12315 - DNA, 26 bp, Homo sapiens
gtaaggcgaagccagcagccaggacc

SEQ ID NO: 12316 - DNA, 26 bp, Homo sapiens
taaggcgaagccagcagccaggaccc

SEQ ID NO: 12317 - DNA, 26 bp, Homo sapiens
aaggcgaagccagcagccaggaccct

SEQ ID NO: 12318 - DNA, 26 bp, Homo sapiens
aggcgaagccagcagccaggaccctg

SEQ ID NO: 12319 - DNA, 26 bp, Homo sapiens
ggcgaagccagcagccaggaccctgc

SEQ ID NO: 12320 - DNA, 26 bp, Homo sapiens
gcgaagccagcagccaggaccctgcc

SEQ ID NO: 12321 - DNA, 26 bp, Homo sapiens
cgaagccagcagccaggaccctgccc

SEQ ID NO: 12322 - DNA, 26 bp, Homo sapiens
gaagccagcagccaggaccctgccca

SEQ ID NO: 12323 - DNA, 26 bp, Homo sapiens
aagccagcagccaggaccctgcccag

SEQ ID NO: 12324 - DNA, 26 bp, Homo sapiens
agccagcagccaggaccctgcccagc

SEQ ID NO: 12325 - DNA, 26 bp, Homo sapiens
gccagcagccaggaccctgcccagcc

SEQ ID NO: 12326 - DNA, 26 bp, Homo sapiens
ccagcagccaggaccctgcccagcca

SEQ ID NO: 12327 - DNA, 26 bp, Homo sapiens
cagcagccaggaccctgcccagccat

SEQ ID NO: 12328 - DNA, 26 bp, Homo sapiens
agcagccaggaccctgcccagccatg

SEQ ID NO: 12329 - DNA, 26 bp, Homo sapiens
gcagccaggaccctgcccagccatgt

SEQ ID NO: 12330 - DNA, 26 bp, Homo sapiens
cagccaggaccctgcccagccatgtg

SEQ ID NO: 12331 - DNA, 26 bp, Homo sapiens
agccaggaccctgcccagccatgtgt

SEQ ID NO: 12332 - DNA, 26 bp, Homo sapiens
gccaggaccctgcccagccatgtgtg

SEQ ID NO: 12333 - DNA, 26 bp, Homo sapiens
ccaggaccctgcccagccatgtgtgc

SEQ ID NO: 12334 - DNA, 26 bp, Homo sapiens
caggaccctgcccagccatgtgtgcg

SEQ ID NO: 12335 - DNA, 26 bp, Homo sapiens
aggaccctgcccagccatgtgtgcgg

SEQ ID NO: 12336 - DNA, 26 bp, Homo sapiens
ggaccctgcccagccatgtgtgcggt

SEQ ID NO: 12337 - DNA, 26 bp, Homo sapiens
gaccctgcccagccatgtgtgcggtg

SEQ ID NO: 12338 - DNA, 26 bp, Homo sapiens
accctgcccagccatgtgtgcggtgt

SEQ ID NO: 12339 - DNA, 26 bp, Homo sapiens
ccctgcccagccatgtgtgcggtgtc

SEQ ID NO: 12340 - DNA, 26 bp, Homo sapiens
cctgcccagccatgtgtgcggtgtct

SEQ ID NO: 12341 - DNA, 26 bp, Homo sapiens
ctgcccagccatgtgtgcggtgtctt

SEQ ID NO: 12342 - DNA, 26 bp, Homo sapiens
tgcccagccatgtgtgcggtgtcttg

SEQ ID NO: 12343 - DNA, 26 bp, Homo sapiens
gcccagccatgtgtgcggtgtcttgt

SEQ ID NO: 12344 - DNA, 26 bp, Homo sapiens
cccagccatgtgtgcggtgtcttgtc

SEQ ID NO: 12345 - DNA, 26 bp, Homo sapiens
ccagccatgtgtgcggtgtcttgtca

SEQ ID NO: 12346 - DNA, 26 bp, Homo sapiens
cagccatgtgtgcggtgtcttgtcac

SEQ ID NO: 12347 - DNA, 26 bp, Homo sapiens
agccatgtgtgcggtgtcttgtcacc

SEQ ID NO: 12348 - DNA, 26 bp, Homo sapiens
gccatgtgtgcggtgtcttgtcacca

SEQ ID NO: 12349 - DNA, 26 bp, Homo sapiens
ccatgtgtgcggtgtcttgtcaccat

SEQ ID NO: 12350 - DNA, 26 bp, Homo sapiens
catgtgtgcggtgtcttgtcaccata

SEQ ID NO: 12351 - DNA, 26 bp, Homo sapiens
atgtgtgcggtgtcttgtcaccatag

SEQ ID NO: 12352 - DNA, 26 bp, Homo sapiens
tgtgtgcggtgtcttgtcaccatagc

SEQ ID NO: 12353 - DNA, 26 bp, Homo sapiens
gtgtgcggtgtcttgtcaccatagcc

SEQ ID NO: 12354 - DNA, 26 bp, Homo sapiens
tgtgcggtgtcttgtcaccatagccg

SEQ ID NO: 12355 - DNA, 26 bp, Homo sapiens
gtgcggtgtcttgtcaccatagccga

SEQ ID NO: 12356 - DNA, 26 bp, Homo sapiens
tgcggtgtcttgtcaccatagccgat

SEQ ID NO: 12357 - DNA, 26 bp, Homo sapiens
gcggtgtcttgtcaccatagccgatg

SEQ ID NO: 12358 - DNA, 26 bp, Homo sapiens
cggtgtcttgtcaccatagccgatgg

SEQ ID NO: 12359 - DNA, 26 bp, Homo sapiens
ggtgtcttgtcaccatagccgatggt

SEQ ID NO: 12360 - DNA, 26 bp, Homo sapiens
gtgtcttgtcaccatagccgatggtt

SEQ ID NO: 12361 - DNA, 26 bp, Homo sapiens
tgtcttgtcaccatagccgatggttg

SEQ ID NO: 12362 - DNA, 26 bp, Homo sapiens
gtcttgtcaccatagccgatggttgt

SEQ ID NO: 12363 - DNA, 26 bp, Homo sapiens
tcttgtcaccatagccgatggttgtc

SEQ ID NO: 12364 - DNA, 26 bp, Homo sapiens
cttgtcaccatagccgatggttgtca

SEQ ID NO: 12365 - DNA, 26 bp, Homo sapiens
ttgtcaccatagccgatggttgtcaa

SEQ ID NO: 12366 - DNA, 26 bp, Homo sapiens
tgtcaccatagccgatggttgtcaat

SEQ ID NO: 12367 - DNA, 26 bp, Homo sapiens
gtcaccatagccgatggttgtcaatg

SEQ ID NO: 12368 - DNA, 26 bp, Homo sapiens
tcaccatagccgatggttgtcaatgt

SEQ ID NO: 12369 - DNA, 26 bp, Homo sapiens
caccatagccgatggttgtcaatgta

SEQ ID NO: 12370 - DNA, 26 bp, Homo sapiens
accatagccgatggttgtcaatgtaa

SEQ ID NO: 12371 - DNA, 26 bp, Homo sapiens
ccatagccgatggttgtcaatgtaat

SEQ ID NO: 12372 - DNA, 26 bp, Homo sapiens
catagccgatggttgtcaatgtaatc

SEQ ID NO: 12373 - DNA, 26 bp, Homo sapiens
atagccgatggttgtcaatgtaatcg

SEQ ID NO: 12374 - DNA, 26 bp, Homo sapiens
tagccgatggttgtcaatgtaatcgt

SEQ ID NO: 12375 - DNA, 26 bp, Homo sapiens
agccgatggttgtcaatgtaatcgtc

SEQ ID NO: 12376 - DNA, 26 bp, Homo sapiens
gccgatggttgtcaatgtaatcgtcc

SEQ ID NO: 12377 - DNA, 26 bp, Homo sapiens
ccgatggttgtcaatgtaatcgtccc

SEQ ID NO: 12378 - DNA, 26 bp, Homo sapiens
cgatggttgtcaatgtaatcgtcccc

SEQ ID NO: 12379 - DNA, 26 bp, Homo sapiens
gatggttgtcaatgtaatcgtccccc

SEQ ID NO: 12380 - DNA, 26 bp, Homo sapiens
atggttgtcaatgtaatcgtccccca

SEQ ID NO: 12381 - DNA, 26 bp, Homo sapiens
tggttgtcaatgtaatcgtcccccac

SEQ ID NO: 12382 - DNA, 26 bp, Homo sapiens
ggttgtcaatgtaatcgtcccccacc

SEQ ID NO: 12383 - DNA, 26 bp, Homo sapiens
gttgtcaatgtaatcgtcccccacca

SEQ ID NO: 12384 - DNA, 26 bp, Homo sapiens
ttgtcaatgtaatcgtcccccaccag

SEQ ID NO: 12385 - DNA, 26 bp, Homo sapiens
tgtcaatgtaatcgtcccccaccaga

SEQ ID NO: 12386 - DNA, 26 bp, Homo sapiens
gtcaatgtaatcgtcccccaccagag

SEQ ID NO: 12387 - DNA, 26 bp, Homo sapiens
tcaatgtaatcgtcccccaccagagc

SEQ ID NO: 12388 - DNA, 26 bp, Homo sapiens
caatgtaatcgtcccccaccagagcg

SEQ ID NO: 12389 - DNA, 26 bp, Homo sapiens
aatgtaatcgtcccccaccagagcga

SEQ ID NO: 12390 - DNA, 26 bp, Homo sapiens
atgtaatcgtcccccaccagagcgag

SEQ ID NO: 12391 - DNA, 26 bp, Homo sapiens
tgtaatcgtcccccaccagagcgagt

SEQ ID NO: 12392 - DNA, 26 bp, Homo sapiens
gtaatcgtcccccaccagagcgagtc

SEQ ID NO: 12393 - DNA, 26 bp, Homo sapiens
taatcgtcccccaccagagcgagtcg

SEQ ID NO: 12394 - DNA, 26 bp, Homo sapiens
aatcgtcccccaccagagcgagtcgg

SEQ ID NO: 12395 - DNA, 26 bp, Homo sapiens
atcgtcccccaccagagcgagtcggc

SEQ ID NO: 12396 - DNA, 26 bp, Homo sapiens
tcgtcccccaccagagcgagtcggcg

SEQ ID NO: 12397 - DNA, 26 bp, Homo sapiens
cgtcccccaccagagcgagtcggcgt

SEQ ID NO: 12398 - DNA, 26 bp, Homo sapiens
gtcccccaccagagcgagtcggcgta

SEQ ID NO: 12399 - DNA, 26 bp, Homo sapiens
tcccccaccagagcgagtcggcgtag

SEQ ID NO: 12400 - DNA, 26 bp, Homo sapiens
cccccaccagagcgagtcggcgtagg

SEQ ID NO: 12401 - DNA, 26 bp, Homo sapiens
ccccaccagagcgagtcggcgtagga

SEQ ID NO: 12402 - DNA, 26 bp, Homo sapiens
cccaccagagcgagtcggcgtaggag

SEQ ID NO: 12403 - DNA, 26 bp, Homo sapiens
ccaccagagcgagtcggcgtaggagg

SEQ ID NO: 12404 - DNA, 26 bp, Homo sapiens
caccagagcgagtcggcgtaggagga

SEQ ID NO: 12405 - DNA, 26 bp, Homo sapiens
accagagcgagtcggcgtaggaggag

SEQ ID NO: 12406 - DNA, 26 bp, Homo sapiens
ccagagcgagtcggcgtaggaggaga

SEQ ID NO: 12407 - DNA, 26 bp, Homo sapiens
cagagcgagtcggcgtaggaggagaa

SEQ ID NO: 12408 - DNA, 26 bp, Homo sapiens
agagcgagtcggcgtaggaggagaag

SEQ ID NO: 12409 - DNA, 26 bp, Homo sapiens
gagcgagtcggcgtaggaggagaagt

SEQ ID NO: 12410 - DNA, 26 bp, Homo sapiens
agcgagtcggcgtaggaggagaagtc

SEQ ID NO: 12411 - DNA, 26 bp, Homo sapiens
gcgagtcggcgtaggaggagaagtcg

SEQ ID NO: 12412 - DNA, 26 bp, Homo sapiens
cgagtcggcgtaggaggagaagtcgg

SEQ ID NO: 12413 - DNA, 26 bp, Homo sapiens
gagtcggcgtaggaggagaagtcgga

SEQ ID NO: 12414 - DNA, 26 bp, Homo sapiens
agtcggcgtaggaggagaagtcggag

SEQ ID NO: 12415 - DNA, 26 bp, Homo sapiens
gtcggcgtaggaggagaagtcggagt

SEQ ID NO: 12416 - DNA, 26 bp, Homo sapiens
tcggcgtaggaggagaagtcggagtt

SEQ ID NO: 12417 - DNA, 26 bp, Homo sapiens
cggcgtaggaggagaagtcggagttg

SEQ ID NO: 12418 - DNA, 26 bp, Homo sapiens
ggcgtaggaggagaagtcggagttgg

SEQ ID NO: 12419 - DNA, 26 bp, Homo sapiens
gcgtaggaggagaagtcggagttggc

SEQ ID NO: 12420 - DNA, 26 bp, Homo sapiens
cgtaggaggagaagtcggagttggcg

SEQ ID NO: 12421 - DNA, 26 bp, Homo sapiens
gtaggaggagaagtcggagttggcgt

SEQ ID NO: 12422 - DNA, 26 bp, Homo sapiens
taggaggagaagtcggagttggcgtc

SEQ ID NO: 12423 - DNA, 26 bp, Homo sapiens
aggaggagaagtcggagttggcgtcc

SEQ ID NO: 12424 - DNA, 26 bp, Homo sapiens
ggaggagaagtcggagttggcgtcct

SEQ ID NO: 12425 - DNA, 26 bp, Homo sapiens
gaggagaagtcggagttggcgtcctt

SEQ ID NO: 12426 - DNA, 26 bp, Homo sapiens
aggagaagtcggagttggcgtccttc

SEQ ID NO: 12427 - DNA, 26 bp, Homo sapiens
ggagaagtcggagttggcgtccttct

SEQ ID NO: 12428 - DNA, 26 bp, Homo sapiens
gagaagtcggagttggcgtccttctc

SEQ ID NO: 12429 - DNA, 26 bp, Homo sapiens
agaagtcggagttggcgtccttctca

SEQ ID NO: 12430 - DNA, 26 bp, Homo sapiens
gaagtcggagttggcgtccttctcag

SEQ ID NO: 12431 - DNA, 26 bp, Homo sapiens
aagtcggagttggcgtccttctcagc

SEQ ID NO: 12432 - DNA, 26 bp, Homo sapiens
agtcggagttggcgtccttctcagcc

SEQ ID NO: 12433 - DNA, 26 bp, Homo sapiens
gtcggagttggcgtccttctcagcca

SEQ ID NO: 12434 - DNA, 26 bp, Homo sapiens
tcggagttggcgtccttctcagccag

SEQ ID NO: 12435 - DNA, 26 bp, Homo sapiens
cggagttggcgtccttctcagccagg

SEQ ID NO: 12436 - DNA, 26 bp, Homo sapiens
ggagttggcgtccttctcagccaggt

SEQ ID NO: 12437 - DNA, 26 bp, Homo sapiens
gagttggcgtccttctcagccaggta

SEQ ID NO: 12438 - DNA, 26 bp, Homo sapiens
agttggcgtccttctcagccaggtag

SEQ ID NO: 12439 - DNA, 26 bp, Homo sapiens
gttggcgtccttctcagccaggtaga

SEQ ID NO: 12440 - DNA, 26 bp, Homo sapiens
ttggcgtccttctcagccaggtagac

SEQ ID NO: 12441 - DNA, 26 bp, Homo sapiens
tggcgtccttctcagccaggtagacc

SEQ ID NO: 12442 - DNA, 26 bp, Homo sapiens
ggcgtccttctcagccaggtagacca

SEQ ID NO: 12443 - DNA, 26 bp, Homo sapiens
gcgtccttctcagccaggtagaccag

SEQ ID NO: 12444 - DNA, 26 bp, Homo sapiens
cgtccttctcagccaggtagaccagg

SEQ ID NO: 12445 - DNA, 26 bp, Homo sapiens
gtccttctcagccaggtagaccagga

SEQ ID NO: 12446 - DNA, 26 bp, Homo sapiens
tccttctcagccaggtagaccaggaa

SEQ ID NO: 12447 - DNA, 26 bp, Homo sapiens
ccttctcagccaggtagaccaggaag

SEQ ID NO: 12448 - DNA, 26 bp, Homo sapiens
cttctcagccaggtagaccaggaagg

SEQ ID NO: 12449 - DNA, 26 bp, Homo sapiens
ttctcagccaggtagaccaggaagga

SEQ ID NO: 12450 - DNA, 26 bp, Homo sapiens
tctcagccaggtagaccaggaaggag

SEQ ID NO: 12451 - DNA, 26 bp, Homo sapiens
ctcagccaggtagaccaggaaggagg

SEQ ID NO: 12452 - DNA, 26 bp, Homo sapiens
tcagccaggtagaccaggaaggaggc

SEQ ID NO: 12453 - DNA, 26 bp, Homo sapiens
cagccaggtagaccaggaaggaggcg

SEQ ID NO: 12454 - DNA, 26 bp, Homo sapiens
agccaggtagaccaggaaggaggcga

SEQ ID NO: 12455 - DNA, 26 bp, Homo sapiens
gccaggtagaccaggaaggaggcgaa

SEQ ID NO: 12456 - DNA, 26 bp, Homo sapiens
ccaggtagaccaggaaggaggcgaag

SEQ ID NO: 12457 - DNA, 26 bp, Homo sapiens
caggtagaccaggaaggaggcgaaga

SEQ ID NO: 12458 - DNA, 26 bp, Homo sapiens
aggtagaccaggaaggaggcgaagat

SEQ ID NO: 12459 - DNA, 26 bp, Homo sapiens
ggtagaccaggaaggaggcgaagatg

SEQ ID NO: 12460 - DNA, 26 bp, Homo sapiens
gtagaccaggaaggaggcgaagatga

SEQ ID NO: 12461 - DNA, 26 bp, Homo sapiens
tagaccaggaaggaggcgaagatgag

SEQ ID NO: 12462 - DNA, 26 bp, Homo sapiens
agaccaggaaggaggcgaagatgagc

SEQ ID NO: 12463 - DNA, 26 bp, Homo sapiens
gaccaggaaggaggcgaagatgagca

SEQ ID NO: 12464 - DNA, 26 bp, Homo sapiens
accaggaaggaggcgaagatgagcac

SEQ ID NO: 12465 - DNA, 26 bp, Homo sapiens
ccaggaaggaggcgaagatgagcacc

SEQ ID NO: 12466 - DNA, 26 bp, Homo sapiens
caggaaggaggcgaagatgagcacca

SEQ ID NO: 12467 - DNA, 26 bp, Homo sapiens
aggaaggaggcgaagatgagcaccag

SEQ ID NO: 12468 - DNA, 26 bp, Homo sapiens
ggaaggaggcgaagatgagcaccagg

SEQ ID NO: 12469 - DNA, 26 bp, Homo sapiens
gaaggaggcgaagatgagcaccagga

SEQ ID NO: 12470 - DNA, 26 bp, Homo sapiens
aaggaggcgaagatgagcaccaggaa

SEQ ID NO: 12471 - DNA, 26 bp, Homo sapiens
aggaggcgaagatgagcaccaggaac

SEQ ID NO: 12472 - DNA, 26 bp, Homo sapiens
ggaggcgaagatgagcaccaggaacc

SEQ ID NO: 12473 - DNA, 26 bp, Homo sapiens
gaggcgaagatgagcaccaggaaccc

SEQ ID NO: 12474 - DNA, 26 bp, Homo sapiens
aggcgaagatgagcaccaggaacccg

SEQ ID NO: 12475 - DNA, 26 bp, Homo sapiens
ggcgaagatgagcaccaggaacccga

SEQ ID NO: 12476 - DNA, 26 bp, Homo sapiens
gcgaagatgagcaccaggaacccgat

SEQ ID NO: 12477 - DNA, 26 bp, Homo sapiens
cgaagatgagcaccaggaacccgatg

SEQ ID NO: 12478 - DNA, 26 bp, Homo sapiens
gaagatgagcaccaggaacccgatgt

SEQ ID NO: 12479 - DNA, 26 bp, Homo sapiens
aagatgagcaccaggaacccgatgta

SEQ ID NO: 12480 - DNA, 26 bp, Homo sapiens
agatgagcaccaggaacccgatgtac

SEQ ID NO: 12481 - DNA, 26 bp, Homo sapiens
gatgagcaccaggaacccgatgtacc

SEQ ID NO: 12482 - DNA, 26 bp, Homo sapiens
atgagcaccaggaacccgatgtacca

SEQ ID NO: 12483 - DNA, 26 bp, Homo sapiens
tgagcaccaggaacccgatgtaccag

SEQ ID NO: 12484 - DNA, 26 bp, Homo sapiens
gagcaccaggaacccgatgtaccagg

SEQ ID NO: 12485 - DNA, 26 bp, Homo sapiens
agcaccaggaacccgatgtaccaggc

SEQ ID NO: 12486 - DNA, 26 bp, Homo sapiens
gcaccaggaacccgatgtaccaggcg

SEQ ID NO: 12487 - DNA, 26 bp, Homo sapiens
caccaggaacccgatgtaccaggcgg

SEQ ID NO: 12488 - DNA, 26 bp, Homo sapiens
accaggaacccgatgtaccaggcggt

SEQ ID NO: 12489 - DNA, 26 bp, Homo sapiens
ccaggaacccgatgtaccaggcggtg

SEQ ID NO: 12490 - DNA, 26 bp, Homo sapiens
caggaacccgatgtaccaggcggtga

SEQ ID NO: 12491 - DNA, 26 bp, Homo sapiens
aggaacccgatgtaccaggcggtgat

SEQ ID NO: 12492 - DNA, 26 bp, Homo sapiens
ggaacccgatgtaccaggcggtgatc

SEQ ID NO: 12493 - DNA, 26 bp, Homo sapiens
gaacccgatgtaccaggcggtgatca

SEQ ID NO: 12494 - DNA, 26 bp, Homo sapiens
aacccgatgtaccaggcggtgatcag

SEQ ID NO: 12495 - DNA, 26 bp, Homo sapiens
acccgatgtaccaggcggtgatcagc

SEQ ID NO: 12496 - DNA, 26 bp, Homo sapiens
cccgatgtaccaggcggtgatcagct

SEQ ID NO: 12497 - DNA, 26 bp, Homo sapiens
ccgatgtaccaggcggtgatcagctc

SEQ ID NO: 12498 - DNA, 26 bp, Homo sapiens
cgatgtaccaggcggtgatcagctcc

SEQ ID NO: 12499 - DNA, 26 bp, Homo sapiens
gatgtaccaggcggtgatcagctcct

SEQ ID NO: 12500 - DNA, 26 bp, Homo sapiens
atgtaccaggcggtgatcagctcctt

SEQ ID NO: 12501 - DNA, 26 bp, Homo sapiens
tgtaccaggcggtgatcagctccttg

SEQ ID NO: 12502 - DNA, 26 bp, Homo sapiens
gtaccaggcggtgatcagctccttgc

SEQ ID NO: 12503 - DNA, 26 bp, Homo sapiens
taccaggcggtgatcagctccttgct

SEQ ID NO: 12504 - DNA, 26 bp, Homo sapiens
accaggcggtgatcagctccttgcta

SEQ ID NO: 12505 - DNA, 26 bp, Homo sapiens
ccaggcggtgatcagctccttgctat

SEQ ID NO: 12506 - DNA, 26 bp, Homo sapiens
caggcggtgatcagctccttgctatg

SEQ ID NO: 12507 - DNA, 26 bp, Homo sapiens
aggcggtgatcagctccttgctatgc

SEQ ID NO: 12508 - DNA, 26 bp, Homo sapiens
ggcggtgatcagctccttgctatgcg

SEQ ID NO: 12509 - DNA, 26 bp, Homo sapiens
gcggtgatcagctccttgctatgcgc

SEQ ID NO: 12510 - DNA, 26 bp, Homo sapiens
cggtgatcagctccttgctatgcgcg

SEQ ID NO: 12511 - DNA, 26 bp, Homo sapiens
ggtgatcagctccttgctatgcgcgt

SEQ ID NO: 12512 - DNA, 26 bp, Homo sapiens
gtgatcagctccttgctatgcgcgta

SEQ ID NO: 12513 - DNA, 26 bp, Homo sapiens
tgatcagctccttgctatgcgcgtag

SEQ ID NO: 12514 - DNA, 26 bp, Homo sapiens
gatcagctccttgctatgcgcgtaga

SEQ ID NO: 12515 - DNA, 26 bp, Homo sapiens
atcagctccttgctatgcgcgtagac

SEQ ID NO: 12516 - DNA, 26 bp, Homo sapiens
tcagctccttgctatgcgcgtagacc

SEQ ID NO: 12517 - DNA, 26 bp, Homo sapiens
cagctccttgctatgcgcgtagacca

SEQ ID NO: 12518 - DNA, 26 bp, Homo sapiens
agctccttgctatgcgcgtagaccac

SEQ ID NO: 12519 - DNA, 26 bp, Homo sapiens
gctccttgctatgcgcgtagaccact

SEQ ID NO: 12520 - DNA, 26 bp, Homo sapiens
ctccttgctatgcgcgtagaccactg

SEQ ID NO: 12521 - DNA, 26 bp, Homo sapiens
tccttgctatgcgcgtagaccactga

SEQ ID NO: 12522 - DNA, 26 bp, Homo sapiens
ccttgctatgcgcgtagaccactgag

SEQ ID NO: 12523 - DNA, 26 bp, Homo sapiens
cttgctatgcgcgtagaccactgagc

SEQ ID NO: 12524 - DNA, 26 bp, Homo sapiens
ttgctatgcgcgtagaccactgagcc

SEQ ID NO: 12525 - DNA, 26 bp, Homo sapiens
tgctatgcgcgtagaccactgagccc

SEQ ID NO: 12526 - DNA, 26 bp, Homo sapiens
gctatgcgcgtagaccactgagccca

SEQ ID NO: 12527 - DNA, 26 bp, Homo sapiens
ctatgcgcgtagaccactgagcccag

SEQ ID NO: 12528 - DNA, 26 bp, Homo sapiens
tatgcgcgtagaccactgagcccagc

SEQ ID NO: 12529 - DNA, 26 bp, Homo sapiens
atgcgcgtagaccactgagcccagca

SEQ ID NO: 12530 - DNA, 26 bp, Homo sapiens
tgcgcgtagaccactgagcccagcag

SEQ ID NO: 12531 - DNA, 26 bp, Homo sapiens
gcgcgtagaccactgagcccagcagc

SEQ ID NO: 12532 - DNA, 26 bp, Homo sapiens
cgcgtagaccactgagcccagcagct

SEQ ID NO: 12533 - DNA, 26 bp, Homo sapiens
gcgtagaccactgagcccagcagctt

SEQ ID NO: 12534 - DNA, 26 bp, Homo sapiens
cgtagaccactgagcccagcagcttc

SEQ ID NO: 12535 - DNA, 26 bp, Homo sapiens
gtagaccactgagcccagcagcttcc

SEQ ID NO: 12536 - DNA, 26 bp, Homo sapiens
tagaccactgagcccagcagcttcca

SEQ ID NO: 12537 - DNA, 26 bp, Homo sapiens
agaccactgagcccagcagcttccag

SEQ ID NO: 12538 - DNA, 26 bp, Homo sapiens
gaccactgagcccagcagcttccagg

SEQ ID NO: 12539 - DNA, 26 bp, Homo sapiens
accactgagcccagcagcttccaggt

SEQ ID NO: 12540 - DNA, 26 bp, Homo sapiens
ccactgagcccagcagcttccaggtg

SEQ ID NO: 12541 - DNA, 26 bp, Homo sapiens
cactgagcccagcagcttccaggtgc

SEQ ID NO: 12542 - DNA, 26 bp, Homo sapiens
actgagcccagcagcttccaggtgcc

SEQ ID NO: 12543 - DNA, 26 bp, Homo sapiens
ctgagcccagcagcttccaggtgccg

SEQ ID NO: 12544 - DNA, 26 bp, Homo sapiens
tgagcccagcagcttccaggtgccgc

SEQ ID NO: 12545 - DNA, 26 bp, Homo sapiens
gagcccagcagcttccaggtgccgcc

SEQ ID NO: 12546 - DNA, 26 bp, Homo sapiens
agcccagcagcttccaggtgccgccg

SEQ ID NO: 12547 - DNA, 26 bp, Homo sapiens
gcccagcagcttccaggtgccgccgc

SEQ ID NO: 12548 - DNA, 26 bp, Homo sapiens
cccagcagcttccaggtgccgccgcg

SEQ ID NO: 12549 - DNA, 26 bp, Homo sapiens
ccagcagcttccaggtgccgccgcgg

SEQ ID NO: 12550 - DNA, 26 bp, Homo sapiens
cagcagcttccaggtgccgccgcggc

SEQ ID NO: 12551 - DNA, 26 bp, Homo sapiens
agcagcttccaggtgccgccgcggcg

SEQ ID NO: 12552 - DNA, 26 bp, Homo sapiens
gcagcttccaggtgccgccgcggcgg

SEQ ID NO: 12553 - DNA, 26 bp, Homo sapiens
cagcttccaggtgccgccgcggcggt

SEQ ID NO: 12554 - DNA, 26 bp, Homo sapiens
agcttccaggtgccgccgcggcggtc

SEQ ID NO: 12555 - DNA, 26 bp, Homo sapiens
gcttccaggtgccgccgcggcggtcc

SEQ ID NO: 12556 - DNA, 26 bp, Homo sapiens
cttccaggtgccgccgcggcggtcca

SEQ ID NO: 12557 - DNA, 26 bp, Homo sapiens
ttccaggtgccgccgcggcggtccat

SEQ ID NO: 12558 - DNA, 26 bp, Homo sapiens
tccaggtgccgccgcggcggtccatg

SEQ ID NO: 12559 - DNA, 26 bp, Homo sapiens
ccaggtgccgccgcggcggtccatgc

SEQ ID NO: 12560 - DNA, 26 bp, Homo sapiens
caggtgccgccgcggcggtccatgcg

SEQ ID NO: 12561 - DNA, 26 bp, Homo sapiens
aggtgccgccgcggcggtccatgcgc

SEQ ID NO: 12562 - DNA, 26 bp, Homo sapiens
ggtgccgccgcggcggtccatgcgca

SEQ ID NO: 12563 - DNA, 26 bp, Homo sapiens
gtgccgccgcggcggtccatgcgcac

SEQ ID NO: 12564 - DNA, 26 bp, Homo sapiens
tgccgccgcggcggtccatgcgcacc

SEQ ID NO: 12565 - DNA, 26 bp, Homo sapiens
gccgccgcggcggtccatgcgcacca

SEQ ID NO: 12566 - DNA, 26 bp, Homo sapiens
ccgccgcggcggtccatgcgcaccat

SEQ ID NO: 12567 - DNA, 26 bp, Homo sapiens
cgccgcggcggtccatgcgcaccatg

SEQ ID NO: 12568 - DNA, 26 bp, Homo sapiens
gccgcggcggtccatgcgcaccatgc

SEQ ID NO: 12569 - DNA, 26 bp, Homo sapiens
ccgcggcggtccatgcgcaccatgcg

SEQ ID NO: 12570 - DNA, 26 bp, Homo sapiens
cgcggcggtccatgcgcaccatgcgc

SEQ ID NO: 12571 - DNA, 26 bp, Homo sapiens
gcggcggtccatgcgcaccatgcgca

SEQ ID NO: 12572 - DNA, 26 bp, Homo sapiens
cggcggtccatgcgcaccatgcgcag

SEQ ID NO: 12573 - DNA, 26 bp, Homo sapiens
ggcggtccatgcgcaccatgcgcagg

SEQ ID NO: 12574 - DNA, 26 bp, Homo sapiens
gcggtccatgcgcaccatgcgcagga

SEQ ID NO: 12575 - DNA, 26 bp, Homo sapiens
cggtccatgcgcaccatgcgcaggat

SEQ ID NO: 12576 - DNA, 26 bp, Homo sapiens
ggtccatgcgcaccatgcgcaggatc

SEQ ID NO: 12577 - DNA, 26 bp, Homo sapiens
gtccatgcgcaccatgcgcaggatct

SEQ ID NO: 12578 - DNA, 26 bp, Homo sapiens
tccatgcgcaccatgcgcaggatctg

SEQ ID NO: 12579 - DNA, 26 bp, Homo sapiens
ccatgcgcaccatgcgcaggatctgc

SEQ ID NO: 12580 - DNA, 26 bp, Homo sapiens
catgcgcaccatgcgcaggatctgca

SEQ ID NO: 12581 - DNA, 26 bp, Homo sapiens
atgcgcaccatgcgcaggatctgcag

SEQ ID NO: 12582 - DNA, 26 bp, Homo sapiens
tgcgcaccatgcgcaggatctgcagg

SEQ ID NO: 12583 - DNA, 26 bp, Homo sapiens
gcgcaccatgcgcaggatctgcagga

SEQ ID NO: 12584 - DNA, 26 bp, Homo sapiens
cgcaccatgcgcaggatctgcaggaa

SEQ ID NO: 12585 - DNA, 26 bp, Homo sapiens
gcaccatgcgcaggatctgcaggaag

SEQ ID NO: 12586 - DNA, 26 bp, Homo sapiens
caccatgcgcaggatctgcaggaagc

SEQ ID NO: 12587 - DNA, 26 bp, Homo sapiens
accatgcgcaggatctgcaggaagcg

SEQ ID NO: 12588 - DNA, 26 bp, Homo sapiens
ccatgcgcaggatctgcaggaagcgc

SEQ ID NO: 12589 - DNA, 26 bp, Homo sapiens
catgcgcaggatctgcaggaagcgca

SEQ ID NO: 12590 - DNA, 26 bp, Homo sapiens
atgcgcaggatctgcaggaagcgcat

SEQ ID NO: 12591 - DNA, 26 bp, Homo sapiens
tgcgcaggatctgcaggaagcgcatg

SEQ ID NO: 12592 - DNA, 26 bp, Homo sapiens
gcgcaggatctgcaggaagcgcatgc

SEQ ID NO: 12593 - DNA, 26 bp, Homo sapiens
cgcaggatctgcaggaagcgcatgct

SEQ ID NO: 12594 - DNA, 26 bp, Homo sapiens
gcaggatctgcaggaagcgcatgctg

SEQ ID NO: 12595 - DNA, 26 bp, Homo sapiens
caggatctgcaggaagcgcatgctgc

SEQ ID NO: 12596 - DNA, 26 bp, Homo sapiens
aggatctgcaggaagcgcatgctgcg

SEQ ID NO: 12597 - DNA, 26 bp, Homo sapiens
ggatctgcaggaagcgcatgctgcgc

SEQ ID NO: 12598 - DNA, 26 bp, Homo sapiens
gatctgcaggaagcgcatgctgcgca

SEQ ID NO: 12599 - DNA, 26 bp, Homo sapiens
atctgcaggaagcgcatgctgcgcag

SEQ ID NO: 12600 - DNA, 26 bp, Homo sapiens
tctgcaggaagcgcatgctgcgcagc

SEQ ID NO: 12601 - DNA, 26 bp, Homo sapiens
ctgcaggaagcgcatgctgcgcagcg

SEQ ID NO: 12602 - DNA, 26 bp, Homo sapiens
tgcaggaagcgcatgctgcgcagcgc

SEQ ID NO: 12603 - DNA, 26 bp, Homo sapiens
gcaggaagcgcatgctgcgcagcgcg

SEQ ID NO: 12604 - DNA, 26 bp, Homo sapiens
caggaagcgcatgctgcgcagcgcgg

SEQ ID NO: 12605 - DNA, 26 bp, Homo sapiens
aggaagcgcatgctgcgcagcgcgga

SEQ ID NO: 12606 - DNA, 26 bp, Homo sapiens
ggaagcgcatgctgcgcagcgcggac

SEQ ID NO: 12607 - DNA, 26 bp, Homo sapiens
gaagcgcatgctgcgcagcgcggacg

SEQ ID NO: 12608 - DNA, 26 bp, Homo sapiens
aagcgcatgctgcgcagcgcggacgt

SEQ ID NO: 12609 - DNA, 26 bp, Homo sapiens
agcgcatgctgcgcagcgcggacgtg

SEQ ID NO: 12610 - DNA, 26 bp, Homo sapiens
gcgcatgctgcgcagcgcggacgtgg

SEQ ID NO: 12611 - DNA, 26 bp, Homo sapiens
cgcatgctgcgcagcgcggacgtggc

SEQ ID NO: 12612 - DNA, 26 bp, Homo sapiens
gcatgctgcgcagcgcggacgtggcg

SEQ ID NO: 12613 - DNA, 26 bp, Homo sapiens
catgctgcgcagcgcggacgtggcga

SEQ ID NO: 12614 - DNA, 26 bp, Homo sapiens
atgctgcgcagcgcggacgtggcgaa

SEQ ID NO: 12615 - DNA, 26 bp, Homo sapiens
tgctgcgcagcgcggacgtggcgaag

SEQ ID NO: 12616 - DNA, 26 bp, Homo sapiens
gctgcgcagcgcggacgtggcgaaga

SEQ ID NO: 12617 - DNA, 26 bp, Homo sapiens
ctgcgcagcgcggacgtggcgaagat

SEQ ID NO: 12618 - DNA, 26 bp, Homo sapiens
tgcgcagcgcggacgtggcgaagatg

SEQ ID NO: 12619 - DNA, 26 bp, Homo sapiens
gcgcagcgcggacgtggcgaagatgt

SEQ ID NO: 12620 - DNA, 26 bp, Homo sapiens
cgcagcgcggacgtggcgaagatgtt

SEQ ID NO: 12621 - DNA, 26 bp, Homo sapiens
gcagcgcggacgtggcgaagatgttg

SEQ ID NO: 12622 - DNA, 26 bp, Homo sapiens
cagcgcggacgtggcgaagatgttgc

SEQ ID NO: 12623 - DNA, 26 bp, Homo sapiens
agcgcggacgtggcgaagatgttgcc

SEQ ID NO: 12624 - DNA, 26 bp, Homo sapiens
gcgcggacgtggcgaagatgttgccc

SEQ ID NO: 12625 - DNA, 26 bp, Homo sapiens
cgcggacgtggcgaagatgttgccct

SEQ ID NO: 12626 - DNA, 26 bp, Homo sapiens
gcggacgtggcgaagatgttgccctg

SEQ ID NO: 12627 - DNA, 26 bp, Homo sapiens
cggacgtggcgaagatgttgccctgg

SEQ ID NO: 12628 - DNA, 26 bp, Homo sapiens
ggacgtggcgaagatgttgccctggg

SEQ ID NO: 12629 - DNA, 26 bp, Homo sapiens
gacgtggcgaagatgttgccctgggt

SEQ ID NO: 12630 - DNA, 26 bp, Homo sapiens
acgtggcgaagatgttgccctgggta

SEQ ID NO: 12631 - DNA, 26 bp, Homo sapiens
cgtggcgaagatgttgccctgggtac

SEQ ID NO: 12632 - DNA, 26 bp, Homo sapiens
gtggcgaagatgttgccctgggtacc

SEQ ID NO: 12633 - DNA, 26 bp, Homo sapiens
tggcgaagatgttgccctgggtaccc

SEQ ID NO: 12634 - DNA, 26 bp, Homo sapiens
ggcgaagatgttgccctgggtacccg

SEQ ID NO: 12635 - DNA, 26 bp, Homo sapiens
gcgaagatgttgccctgggtacccgc

SEQ ID NO: 12636 - DNA, 26 bp, Homo sapiens
cgaagatgttgccctgggtacccgcg

SEQ ID NO: 12637 - DNA, 26 bp, Homo sapiens
gaagatgttgccctgggtacccgcgg

SEQ ID NO: 12638 - DNA, 26 bp, Homo sapiens
aagatgttgccctgggtacccgcggc

SEQ ID NO: 12639 - DNA, 26 bp, Homo sapiens
agatgttgccctgggtacccgcggcg

SEQ ID NO: 12640 - DNA, 26 bp, Homo sapiens
gatgttgccctgggtacccgcggcga

SEQ ID NO: 12641 - DNA, 26 bp, Homo sapiens
atgttgccctgggtacccgcggcgat

SEQ ID NO: 12642 - DNA, 26 bp, Homo sapiens
tgttgccctgggtacccgcggcgatg

SEQ ID NO: 12643 - DNA, 26 bp, Homo sapiens
gttgccctgggtacccgcggcgatga

SEQ ID NO: 12644 - DNA, 26 bp, Homo sapiens
ttgccctgggtacccgcggcgatgac

SEQ ID NO: 12645 - DNA, 26 bp, Homo sapiens
tgccctgggtacccgcggcgatgacg

SEQ ID NO: 12646 - DNA, 26 bp, Homo sapiens
gccctgggtacccgcggcgatgacgg

SEQ ID NO: 12647 - DNA, 26 bp, Homo sapiens
ccctgggtacccgcggcgatgacggc

SEQ ID NO: 12648 - DNA, 26 bp, Homo sapiens
cctgggtacccgcggcgatgacggcc

SEQ ID NO: 12649 - DNA, 26 bp, Homo sapiens
ctgggtacccgcggcgatgacggcca

SEQ ID NO: 12650 - DNA, 26 bp, Homo sapiens
tgggtacccgcggcgatgacggccac

SEQ ID NO: 12651 - DNA, 26 bp, Homo sapiens
gggtacccgcggcgatgacggccacc

SEQ ID NO: 12652 - DNA, 26 bp, Homo sapiens
ggtacccgcggcgatgacggccaccg

SEQ ID NO: 12653 - DNA, 26 bp, Homo sapiens
gtacccgcggcgatgacggccaccga

SEQ ID NO: 12654 - DNA, 26 bp, Homo sapiens
tacccgcggcgatgacggccaccgag

SEQ ID NO: 12655 - DNA, 26 bp, Homo sapiens
acccgcggcgatgacggccaccgagg

SEQ ID NO: 12656 - DNA, 26 bp, Homo sapiens
cccgcggcgatgacggccaccgaggc

SEQ ID NO: 12657 - DNA, 26 bp, Homo sapiens
ccgcggcgatgacggccaccgaggcc

SEQ ID NO: 12658 - DNA, 26 bp, Homo sapiens
cgcggcgatgacggccaccgaggcca

SEQ ID NO: 12659 - DNA, 26 bp, Homo sapiens
gcggcgatgacggccaccgaggccac

SEQ ID NO: 12660 - DNA, 26 bp, Homo sapiens
cggcgatgacggccaccgaggccacg

SEQ ID NO: 12661 - DNA, 26 bp, Homo sapiens
ggcgatgacggccaccgaggccacga

SEQ ID NO: 12662 - DNA, 26 bp, Homo sapiens
gcgatgacggccaccgaggccacgaa

SEQ ID NO: 12663 - DNA, 26 bp, Homo sapiens
cgatgacggccaccgaggccacgaac

SEQ ID NO: 12664 - DNA, 26 bp, Homo sapiens
gatgacggccaccgaggccacgaaca

SEQ ID NO: 12665 - DNA, 26 bp, Homo sapiens
atgacggccaccgaggccacgaacac

SEQ ID NO: 12666 - DNA, 26 bp, Homo sapiens
tgacggccaccgaggccacgaacacg

SEQ ID NO: 12667 - DNA, 26 bp, Homo sapiens
gacggccaccgaggccacgaacacga

SEQ ID NO: 12668 - DNA, 26 bp, Homo sapiens
acggccaccgaggccacgaacacgat

SEQ ID NO: 12669 - DNA, 26 bp, Homo sapiens
cggccaccgaggccacgaacacgatg

SEQ ID NO: 12670 - DNA, 26 bp, Homo sapiens
ggccaccgaggccacgaacacgatga

SEQ ID NO: 12671 - DNA, 26 bp, Homo sapiens
gccaccgaggccacgaacacgatgaa

SEQ ID NO: 12672 - DNA, 26 bp, Homo sapiens
ccaccgaggccacgaacacgatgaag

SEQ ID NO: 12673 - DNA, 26 bp, Homo sapiens
caccgaggccacgaacacgatgaagt

SEQ ID NO: 12674 - DNA, 26 bp, Homo sapiens
accgaggccacgaacacgatgaagtc

SEQ ID NO: 12675 - DNA, 26 bp, Homo sapiens
ccgaggccacgaacacgatgaagtcg

SEQ ID NO: 12676 - DNA, 26 bp, Homo sapiens
cgaggccacgaacacgatgaagtcga

SEQ ID NO: 12677 - DNA, 26 bp, Homo sapiens
gaggccacgaacacgatgaagtcgat

SEQ ID NO: 12678 - DNA, 26 bp, Homo sapiens
aggccacgaacacgatgaagtcgatg

SEQ ID NO: 12679 - DNA, 26 bp, Homo sapiens
ggccacgaacacgatgaagtcgatga

SEQ ID NO: 12680 - DNA, 26 bp, Homo sapiens
gccacgaacacgatgaagtcgatgac

SEQ ID NO: 12681 - DNA, 26 bp, Homo sapiens
ccacgaacacgatgaagtcgatgaca

SEQ ID NO: 12682 - DNA, 26 bp, Homo sapiens
cacgaacacgatgaagtcgatgacac

SEQ ID NO: 12683 - DNA, 26 bp, Homo sapiens
acgaacacgatgaagtcgatgacaca

SEQ ID NO: 12684 - DNA, 26 bp, Homo sapiens
cgaacacgatgaagtcgatgacacag

SEQ ID NO: 12685 - DNA, 26 bp, Homo sapiens
gaacacgatgaagtcgatgacacaga

SEQ ID NO: 12686 - DNA, 26 bp, Homo sapiens
aacacgatgaagtcgatgacacagaa

SEQ ID NO: 12687 - DNA, 26 bp, Homo sapiens
acacgatgaagtcgatgacacagaag

SEQ ID NO: 12688 - DNA, 26 bp, Homo sapiens
cacgatgaagtcgatgacacagaagg

SEQ ID NO: 12689 - DNA, 26 bp, Homo sapiens
acgatgaagtcgatgacacagaaggg

SEQ ID NO: 12690 - DNA, 26 bp, Homo sapiens
cgatgaagtcgatgacacagaagggc

SEQ ID NO: 12691 - DNA, 26 bp, Homo sapiens
gatgaagtcgatgacacagaagggct

SEQ ID NO: 12692 - DNA, 26 bp, Homo sapiens
atgaagtcgatgacacagaagggctt

SEQ ID NO: 12693 - DNA, 26 bp, Homo sapiens
tgaagtcgatgacacagaagggcttt

SEQ ID NO: 12694 - DNA, 26 bp, Homo sapiens
gaagtcgatgacacagaagggctttc

SEQ ID NO: 12695 - DNA, 26 bp, Homo sapiens
aagtcgatgacacagaagggctttct

SEQ ID NO: 12696 - DNA, 26 bp, Homo sapiens
agtcgatgacacagaagggctttctg

SEQ ID NO: 12697 - DNA, 26 bp, Homo sapiens
gtcgatgacacagaagggctttctgg

SEQ ID NO: 12698 - DNA, 26 bp, Homo sapiens
tcgatgacacagaagggctttctggc

SEQ ID NO: 12699 - DNA, 26 bp, Homo sapiens
cgatgacacagaagggctttctggca

SEQ ID NO: 12700 - DNA, 26 bp, Homo sapiens
gatgacacagaagggctttctggcaa

SEQ ID NO: 12701 - DNA, 26 bp, Homo sapiens
atgacacagaagggctttctggcaaa

SEQ ID NO: 12702 - DNA, 26 bp, Homo sapiens
tgacacagaagggctttctggcaaag

SEQ ID NO: 12703 - DNA, 26 bp, Homo sapiens
gacacagaagggctttctggcaaagc

SEQ ID NO: 12704 - DNA, 26 bp, Homo sapiens
acacagaagggctttctggcaaagcg

SEQ ID NO: 12705 - DNA, 26 bp, Homo sapiens
cacagaagggctttctggcaaagcgg

SEQ ID NO: 12706 - DNA, 26 bp, Homo sapiens
acagaagggctttctggcaaagcgga

SEQ ID NO: 12707 - DNA, 26 bp, Homo sapiens
cagaagggctttctggcaaagcggaa

SEQ ID NO: 12708 - DNA, 26 bp, Homo sapiens
agaagggctttctggcaaagcggaag

SEQ ID NO: 12709 - DNA, 26 bp, Homo sapiens
gaagggctttctggcaaagcggaagc

SEQ ID NO: 12710 - DNA, 26 bp, Homo sapiens
aagggctttctggcaaagcggaagcg

SEQ ID NO: 12711 - DNA, 26 bp, Homo sapiens
agggctttctggcaaagcggaagcga

SEQ ID NO: 12712 - DNA, 26 bp, Homo sapiens
gggctttctggcaaagcggaagcgac

SEQ ID NO: 12713 - DNA, 26 bp, Homo sapiens
ggctttctggcaaagcggaagcgacc

SEQ ID NO: 12714 - DNA, 26 bp, Homo sapiens
gctttctggcaaagcggaagcgaccc

SEQ ID NO: 12715 - DNA, 26 bp, Homo sapiens
ctttctggcaaagcggaagcgaccct

SEQ ID NO: 12716 - DNA, 26 bp, Homo sapiens
tttctggcaaagcggaagcgaccctg

SEQ ID NO: 12717 - DNA, 26 bp, Homo sapiens
ttctggcaaagcggaagcgaccctgc

SEQ ID NO: 12718 - DNA, 26 bp, Homo sapiens
tctggcaaagcggaagcgaccctgcc

SEQ ID NO: 12719 - DNA, 26 bp, Homo sapiens
ctggcaaagcggaagcgaccctgcca

SEQ ID NO: 12720 - DNA, 26 bp, Homo sapiens
tggcaaagcggaagcgaccctgccat

SEQ ID NO: 12721 - DNA, 26 bp, Homo sapiens
ggcaaagcggaagcgaccctgccatc

SEQ ID NO: 12722 - DNA, 26 bp, Homo sapiens
gcaaagcggaagcgaccctgccatcc

SEQ ID NO: 12723 - DNA, 26 bp, Homo sapiens
caaagcggaagcgaccctgccatcct

SEQ ID NO: 12724 - DNA, 26 bp, Homo sapiens
aaagcggaagcgaccctgccatcctc

SEQ ID NO: 12725 - DNA, 26 bp, Homo sapiens
aagcggaagcgaccctgccatcctcg

SEQ ID NO: 12726 - DNA, 26 bp, Homo sapiens
agcggaagcgaccctgccatcctcgg

SEQ ID NO: 12727 - DNA, 26 bp, Homo sapiens
gcggaagcgaccctgccatcctcggt

SEQ ID NO: 12728 - DNA, 26 bp, Homo sapiens
cggaagcgaccctgccatcctcggta

SEQ ID NO: 12729 - DNA, 26 bp, Homo sapiens
ggaagcgaccctgccatcctcggtag

SEQ ID NO: 12730 - DNA, 26 bp, Homo sapiens
gaagcgaccctgccatcctcggtagc

SEQ ID NO: 12731 - DNA, 26 bp, Homo sapiens
aagcgaccctgccatcctcggtagcg

SEQ ID NO: 12732 - DNA, 26 bp, Homo sapiens
agcgaccctgccatcctcggtagcgg

SEQ ID NO: 12733 - DNA, 26 bp, Homo sapiens
gcgaccctgccatcctcggtagcggc

SEQ ID NO: 12734 - DNA, 26 bp, Homo sapiens
cgaccctgccatcctcggtagcggca

SEQ ID NO: 12735 - DNA, 26 bp, Homo sapiens
gaccctgccatcctcggtagcggcag

SEQ ID NO: 12736 - DNA, 26 bp, Homo sapiens
accctgccatcctcggtagcggcagc

SEQ ID NO: 12737 - DNA, 26 bp, Homo sapiens
ccctgccatcctcggtagcggcagca

SEQ ID NO: 12738 - DNA, 26 bp, Homo sapiens
cctgccatcctcggtagcggcagcag

SEQ ID NO: 12739 - DNA, 26 bp, Homo sapiens
ctgccatcctcggtagcggcagcagc

SEQ ID NO: 12740 - DNA, 26 bp, Homo sapiens
tgccatcctcggtagcggcagcagca

SEQ ID NO: 12741 - DNA, 26 bp, Homo sapiens
gccatcctcggtagcggcagcagcat

SEQ ID NO: 12742 - DNA, 26 bp, Homo sapiens
ccatcctcggtagcggcagcagcatc

SEQ ID NO: 12743 - DNA, 26 bp, Homo sapiens
catcctcggtagcggcagcagcatcc

SEQ ID NO: 12744 - DNA, 26 bp, Homo sapiens
atcctcggtagcggcagcagcatccg

SEQ ID NO: 12745 - DNA, 26 bp, Homo sapiens
tcctcggtagcggcagcagcatccgg

SEQ ID NO: 12746 - DNA, 26 bp, Homo sapiens
cctcggtagcggcagcagcatccggc

SEQ ID NO: 12747 - DNA, 26 bp, Homo sapiens
ctcggtagcggcagcagcatccggcg

SEQ ID NO: 12748 - DNA, 26 bp, Homo sapiens
tcggtagcggcagcagcatccggcgg

SEQ ID NO: 12749 - DNA, 26 bp, Homo sapiens
cggtagcggcagcagcatccggcgga

SEQ ID NO: 12750 - DNA, 26 bp, Homo sapiens
ggtagcggcagcagcatccggcggac

SEQ ID NO: 12751 - DNA, 26 bp, Homo sapiens
gtagcggcagcagcatccggcggacc

SEQ ID NO: 12752 - DNA, 26 bp, Homo sapiens
tagcggcagcagcatccggcggacca

SEQ ID NO: 12753 - DNA, 26 bp, Homo sapiens
agcggcagcagcatccggcggaccag

SEQ ID NO: 12754 - DNA, 26 bp, Homo sapiens
gcggcagcagcatccggcggaccaga

SEQ ID NO: 12755 - DNA, 26 bp, Homo sapiens
cggcagcagcatccggcggaccagac

SEQ ID NO: 12756 - DNA, 26 bp, Homo sapiens
ggcagcagcatccggcggaccagacc

SEQ ID NO: 12757 - DNA, 26 bp, Homo sapiens
gcagcagcatccggcggaccagaccc

SEQ ID NO: 12758 - DNA, 26 bp, Homo sapiens
cagcagcatccggcggaccagacccg

SEQ ID NO: 12759 - DNA, 26 bp, Homo sapiens
agcagcatccggcggaccagacccgg

SEQ ID NO: 12760 - DNA, 26 bp, Homo sapiens
gcagcatccggcggaccagacccgga

SEQ ID NO: 12761 - DNA, 26 bp, Homo sapiens
cagcatccggcggaccagacccggac

SEQ ID NO: 12762 - DNA, 26 bp, Homo sapiens
agcatccggcggaccagacccggacg

SEQ ID NO: 12763 - DNA, 26 bp, Homo sapiens
gcatccggcggaccagacccggacga

SEQ ID NO: 12764 - DNA, 26 bp, Homo sapiens
catccggcggaccagacccggacgat

SEQ ID NO: 12765 - DNA, 26 bp, Homo sapiens
atccggcggaccagacccggacgatg

SEQ ID NO: 12766 - DNA, 26 bp, Homo sapiens
tccggcggaccagacccggacgatgt

SEQ ID NO: 12767 - DNA, 26 bp, Homo sapiens
ccggcggaccagacccggacgatgta

SEQ ID NO: 12768 - DNA, 26 bp, Homo sapiens
cggcggaccagacccggacgatgtac

SEQ ID NO: 12769 - DNA, 26 bp, Homo sapiens
ggcggaccagacccggacgatgtact

SEQ ID NO: 12770 - DNA, 26 bp, Homo sapiens
gcggaccagacccggacgatgtactc

SEQ ID NO: 12771 - DNA, 26 bp, Homo sapiens
cggaccagacccggacgatgtactcc

SEQ ID NO: 12772 - DNA, 26 bp, Homo sapiens
ggaccagacccggacgatgtactcca

SEQ ID NO: 12773 - DNA, 26 bp, Homo sapiens
gaccagacccggacgatgtactccaa

SEQ ID NO: 12774 - DNA, 26 bp, Homo sapiens
accagacccggacgatgtactccaag

SEQ ID NO: 12775 - DNA, 26 bp, Homo sapiens
ccagacccggacgatgtactccaagc

SEQ ID NO: 12776 - DNA, 26 bp, Homo sapiens
cagacccggacgatgtactccaagcc

SEQ ID NO: 12777 - DNA, 26 bp, Homo sapiens
agacccggacgatgtactccaagccg

SEQ ID NO: 12778 - DNA, 26 bp, Homo sapiens
gacccggacgatgtactccaagccga

SEQ ID NO: 12779 - DNA, 26 bp, Homo sapiens
acccggacgatgtactccaagccgaa

SEQ ID NO: 12780 - DNA, 26 bp, Homo sapiens
cccggacgatgtactccaagccgaaa

SEQ ID NO: 12781 - DNA, 26 bp, Homo sapiens
ccggacgatgtactccaagccgaaaa

SEQ ID NO: 12782 - DNA, 26 bp, Homo sapiens
cggacgatgtactccaagccgaaaac

SEQ ID NO: 12783 - DNA, 26 bp, Homo sapiens
ggacgatgtactccaagccgaaaacc

SEQ ID NO: 12784 - DNA, 26 bp, Homo sapiens
gacgatgtactccaagccgaaaacca

SEQ ID NO: 12785 - DNA, 26 bp, Homo sapiens
acgatgtactccaagccgaaaaccac

SEQ ID NO: 12786 - DNA, 26 bp, Homo sapiens
cgatgtactccaagccgaaaaccacg

SEQ ID NO: 12787 - DNA, 26 bp, Homo sapiens
gatgtactccaagccgaaaaccacga

SEQ ID NO: 12788 - DNA, 26 bp, Homo sapiens
atgtactccaagccgaaaaccacgat

SEQ ID NO: 12789 - DNA, 26 bp, Homo sapiens
tgtactccaagccgaaaaccacgatc

SEQ ID NO: 12790 - DNA, 26 bp, Homo sapiens
gtactccaagccgaaaaccacgatca

SEQ ID NO: 12791 - DNA, 26 bp, Homo sapiens
tactccaagccgaaaaccacgatcat

SEQ ID NO: 12792 - DNA, 26 bp, Homo sapiens
actccaagccgaaaaccacgatcatc

SEQ ID NO: 12793 - DNA, 26 bp, Homo sapiens
ctccaagccgaaaaccacgatcatca

SEQ ID NO: 12794 - DNA, 26 bp, Homo sapiens
tccaagccgaaaaccacgatcatcac

SEQ ID NO: 12795 - DNA, 26 bp, Homo sapiens
ccaagccgaaaaccacgatcatcacg

SEQ ID NO: 12796 - DNA, 26 bp, Homo sapiens
caagccgaaaaccacgatcatcacga

SEQ ID NO: 12797 - DNA, 26 bp, Homo sapiens
aagccgaaaaccacgatcatcacgaa

SEQ ID NO: 12798 - DNA, 26 bp, Homo sapiens
agccgaaaaccacgatcatcacgaat

SEQ ID NO: 12799 - DNA, 26 bp, Homo sapiens
gccgaaaaccacgatcatcacgaatt

SEQ ID NO: 12800 - DNA, 26 bp, Homo sapiens
ccgaaaaccacgatcatcacgaattc

SEQ ID NO: 12801 - DNA, 26 bp, Homo sapiens
cgaaaaccacgatcatcacgaattcc

SEQ ID NO: 12802 - DNA, 26 bp, Homo sapiens
gaaaaccacgatcatcacgaattcca

SEQ ID NO: 12803 - DNA, 26 bp, Homo sapiens
aaaaccacgatcatcacgaattccaa

SEQ ID NO: 12804 - DNA, 26 bp, Homo sapiens
aaaccacgatcatcacgaattccaag

SEQ ID NO: 12805 - DNA, 26 bp, Homo sapiens
aaccacgatcatcacgaattccaaga

SEQ ID NO: 12806 - DNA, 26 bp, Homo sapiens
accacgatcatcacgaattccaagat

SEQ ID NO: 12807 - DNA, 26 bp, Homo sapiens
ccacgatcatcacgaattccaagatg

SEQ ID NO: 12808 - DNA, 26 bp, Homo sapiens
cacgatcatcacgaattccaagatga

SEQ ID NO: 12809 - DNA, 26 bp, Homo sapiens
acgatcatcacgaattccaagatgag

SEQ ID NO: 12810 - DNA, 26 bp, Homo sapiens
cgatcatcacgaattccaagatgagg

SEQ ID NO: 12811 - DNA, 26 bp, Homo sapiens
gatcatcacgaattccaagatgagga

SEQ ID NO: 12812 - DNA, 26 bp, Homo sapiens
atcatcacgaattccaagatgaggag

SEQ ID NO: 12813 - DNA, 26 bp, Homo sapiens
tcatcacgaattccaagatgaggaga

SEQ ID NO: 12814 - DNA, 26 bp, Homo sapiens
catcacgaattccaagatgaggagac

SEQ ID NO: 12815 - DNA, 26 bp, Homo sapiens
atcacgaattccaagatgaggagaca

SEQ ID NO: 12816 - DNA, 26 bp, Homo sapiens
tcacgaattccaagatgaggagacac

SEQ ID NO: 12817 - DNA, 26 bp, Homo sapiens
cacgaattccaagatgaggagacact

SEQ ID NO: 12818 - DNA, 26 bp, Homo sapiens
acgaattccaagatgaggagacactc

SEQ ID NO: 12819 - DNA, 26 bp, Homo sapiens
cgaattccaagatgaggagacactcg

SEQ ID NO: 12820 - DNA, 26 bp, Homo sapiens
gaattccaagatgaggagacactcgt

SEQ ID NO: 12821 - DNA, 26 bp, Homo sapiens
aattccaagatgaggagacactcgtt

SEQ ID NO: 12822 - DNA, 26 bp, Homo sapiens
attccaagatgaggagacactcgttg

SEQ ID NO: 12823 - DNA, 26 bp, Homo sapiens
ttccaagatgaggagacactcgttgg

SEQ ID NO: 12824 - DNA, 26 bp, Homo sapiens
tccaagatgaggagacactcgttggc

SEQ ID NO: 12825 - DNA, 26 bp, Homo sapiens
ccaagatgaggagacactcgttggca

SEQ ID NO: 12826 - DNA, 26 bp, Homo sapiens
caagatgaggagacactcgttggcaa

SEQ ID NO: 12827 - DNA, 26 bp, Homo sapiens
aagatgaggagacactcgttggcaag

SEQ ID NO: 12828 - DNA, 26 bp, Homo sapiens
agatgaggagacactcgttggcaagt

SEQ ID NO: 12829 - DNA, 26 bp, Homo sapiens
gatgaggagacactcgttggcaagtt

SEQ ID NO: 12830 - DNA, 26 bp, Homo sapiens
atgaggagacactcgttggcaagttc

SEQ ID NO: 12831 - DNA, 26 bp, Homo sapiens
tgaggagacactcgttggcaagttcc

SEQ ID NO: 12832 - DNA, 26 bp, Homo sapiens
gaggagacactcgttggcaagttcct

SEQ ID NO: 12833 - DNA, 26 bp, Homo sapiens
aggagacactcgttggcaagttcctg

SEQ ID NO: 12834 - DNA, 26 bp, Homo sapiens
ggagacactcgttggcaagttcctgg

SEQ ID NO: 12835 - DNA, 26 bp, Homo sapiens
gagacactcgttggcaagttcctggt

SEQ ID NO: 12836 - DNA, 26 bp, Homo sapiens
agacactcgttggcaagttcctggtg

SEQ ID NO: 12837 - DNA, 26 bp, Homo sapiens
gacactcgttggcaagttcctggtgc

SEQ ID NO: 12838 - DNA, 26 bp, Homo sapiens
acactcgttggcaagttcctggtgct

SEQ ID NO: 12839 - DNA, 26 bp, Homo sapiens
cactcgttggcaagttcctggtgctc

SEQ ID NO: 12840 - DNA, 26 bp, Homo sapiens
actcgttggcaagttcctggtgctcc

SEQ ID NO: 12841 - DNA, 26 bp, Homo sapiens
ctcgttggcaagttcctggtgctcct

SEQ ID NO: 12842 - DNA, 26 bp, Homo sapiens
tcgttggcaagttcctggtgctcctg

SEQ ID NO: 12843 - DNA, 26 bp, Homo sapiens
cgttggcaagttcctggtgctcctgg

SEQ ID NO: 12844 - DNA, 26 bp, Homo sapiens
gttggcaagttcctggtgctcctgga

SEQ ID NO: 12845 - DNA, 26 bp, Homo sapiens
ttggcaagttcctggtgctcctggat

SEQ ID NO: 12846 - DNA, 26 bp, Homo sapiens
tggcaagttcctggtgctcctggata

SEQ ID NO: 12847 - DNA, 26 bp, Homo sapiens
ggcaagttcctggtgctcctggatag

SEQ ID NO: 12848 - DNA, 26 bp, Homo sapiens
gcaagttcctggtgctcctggatagt

SEQ ID NO: 12849 - DNA, 26 bp, Homo sapiens
caagttcctggtgctcctggatagtg

SEQ ID NO: 12850 - DNA, 26 bp, Homo sapiens
aagttcctggtgctcctggatagtgg

SEQ ID NO: 12851 - DNA, 26 bp, Homo sapiens
agttcctggtgctcctggatagtgga

SEQ ID NO: 12852 - DNA, 26 bp, Homo sapiens
gttcctggtgctcctggatagtggac

SEQ ID NO: 12853 - DNA, 26 bp, Homo sapiens
ttcctggtgctcctggatagtggaca

SEQ ID NO: 12854 - DNA, 26 bp, Homo sapiens
tcctggtgctcctggatagtggacag

SEQ ID NO: 12855 - DNA, 26 bp, Homo sapiens
cctggtgctcctggatagtggacagc

SEQ ID NO: 12856 - DNA, 26 bp, Homo sapiens
ctggtgctcctggatagtggacagca

SEQ ID NO: 12857 - DNA, 26 bp, Homo sapiens
tggtgctcctggatagtggacagcac

SEQ ID NO: 12858 - DNA, 26 bp, Homo sapiens
ggtgctcctggatagtggacagcaca

SEQ ID NO: 12859 - DNA, 26 bp, Homo sapiens
gtgctcctggatagtggacagcacag

SEQ ID NO: 12860 - DNA, 26 bp, Homo sapiens
tgctcctggatagtggacagcacaga

SEQ ID NO: 12861 - DNA, 26 bp, Homo sapiens
gctcctggatagtggacagcacagac

SEQ ID NO: 12862 - DNA, 26 bp, Homo sapiens
ctcctggatagtggacagcacagaca

SEQ ID NO: 12863 - DNA, 26 bp, Homo sapiens
tcctggatagtggacagcacagacag

SEQ ID NO: 12864 - DNA, 26 bp, Homo sapiens
cctggatagtggacagcacagacagc

SEQ ID NO: 12865 - DNA, 26 bp, Homo sapiens
ctggatagtggacagcacagacagca

SEQ ID NO: 12866 - DNA, 26 bp, Homo sapiens
tggatagtggacagcacagacagcac

SEQ ID NO: 12867 - DNA, 26 bp, Homo sapiens
ggatagtggacagcacagacagcacc

SEQ ID NO: 12868 - DNA, 26 bp, Homo sapiens
gatagtggacagcacagacagcacca

SEQ ID NO: 12869 - DNA, 26 bp, Homo sapiens
atagtggacagcacagacagcaccag

SEQ ID NO: 12870 - DNA, 26 bp, Homo sapiens
tagtggacagcacagacagcaccagg

SEQ ID NO: 12871 - DNA, 26 bp, Homo sapiens
agtggacagcacagacagcaccaggc

SEQ ID NO: 12872 - DNA, 26 bp, Homo sapiens
gtggacagcacagacagcaccaggca

SEQ ID NO: 12873 - DNA, 26 bp, Homo sapiens
tggacagcacagacagcaccaggcag

SEQ ID NO: 12874 - DNA, 26 bp, Homo sapiens
ggacagcacagacagcaccaggcagc

SEQ ID NO: 12875 - DNA, 26 bp, Homo sapiens
gacagcacagacagcaccaggcagct

SEQ ID NO: 12876 - DNA, 26 bp, Homo sapiens
acagcacagacagcaccaggcagctg

SEQ ID NO: 12877 - DNA, 26 bp, Homo sapiens
cagcacagacagcaccaggcagctga

SEQ ID NO: 12878 - DNA, 26 bp, Homo sapiens
agcacagacagcaccaggcagctgaa

SEQ ID NO: 12879 - DNA, 26 bp, Homo sapiens
gcacagacagcaccaggcagctgaag

SEQ ID NO: 12880 - DNA, 26 bp, Homo sapiens
cacagacagcaccaggcagctgaaga

SEQ ID NO: 12881 - DNA, 26 bp, Homo sapiens
acagacagcaccaggcagctgaagac

SEQ ID NO: 12882 - DNA, 26 bp, Homo sapiens
cagacagcaccaggcagctgaagacc

SEQ ID NO: 12883 - DNA, 26 bp, Homo sapiens
agacagcaccaggcagctgaagacca

SEQ ID NO: 12884 - DNA, 26 bp, Homo sapiens
gacagcaccaggcagctgaagaccag

SEQ ID NO: 12885 - DNA, 26 bp, Homo sapiens
acagcaccaggcagctgaagaccagc

SEQ ID NO: 12886 - DNA, 26 bp, Homo sapiens
cagcaccaggcagctgaagaccagca

SEQ ID NO: 12887 - DNA, 26 bp, Homo sapiens
agcaccaggcagctgaagaccagcaa

SEQ ID NO: 12888 - DNA, 26 bp, Homo sapiens
gcaccaggcagctgaagaccagcaaa

SEQ ID NO: 12889 - DNA, 26 bp, Homo sapiens
caccaggcagctgaagaccagcaaaa

SEQ ID NO: 12890 - DNA, 26 bp, Homo sapiens
accaggcagctgaagaccagcaaaaa

SEQ ID NO: 12891 - DNA, 26 bp, Homo sapiens
ccaggcagctgaagaccagcaaaaat

SEQ ID NO: 12892 - DNA, 26 bp, Homo sapiens
caggcagctgaagaccagcaaaaata

SEQ ID NO: 12893 - DNA, 26 bp, Homo sapiens
aggcagctgaagaccagcaaaaatat

SEQ ID NO: 12894 - DNA, 26 bp, Homo sapiens
ggcagctgaagaccagcaaaaatatg

SEQ ID NO: 12895 - DNA, 26 bp, Homo sapiens
gcagctgaagaccagcaaaaatatga

SEQ ID NO: 12896 - DNA, 26 bp, Homo sapiens
cagctgaagaccagcaaaaatatgaa

SEQ ID NO: 12897 - DNA, 26 bp, Homo sapiens
agctgaagaccagcaaaaatatgaag

SEQ ID NO: 12898 - DNA, 26 bp, Homo sapiens
gctgaagaccagcaaaaatatgaaga

SEQ ID NO: 12899 - DNA, 26 bp, Homo sapiens
ctgaagaccagcaaaaatatgaagac

SEQ ID NO: 12900 - DNA, 26 bp, Homo sapiens
tgaagaccagcaaaaatatgaagacg

SEQ ID NO: 12901 - DNA, 26 bp, Homo sapiens
gaagaccagcaaaaatatgaagacgt

SEQ ID NO: 12902 - DNA, 26 bp, Homo sapiens
aagaccagcaaaaatatgaagacgtg

SEQ ID NO: 12903 - DNA, 26 bp, Homo sapiens
agaccagcaaaaatatgaagacgtgg

SEQ ID NO: 12904 - DNA, 26 bp, Homo sapiens
gaccagcaaaaatatgaagacgtggt

SEQ ID NO: 12905 - DNA, 26 bp, Homo sapiens
accagcaaaaatatgaagacgtggta

SEQ ID NO: 12906 - DNA, 26 bp, Homo sapiens
ccagcaaaaatatgaagacgtggtag

SEQ ID NO: 12907 - DNA, 26 bp, Homo sapiens
cagcaaaaatatgaagacgtggtaga

SEQ ID NO: 12908 - DNA, 26 bp, Homo sapiens
agcaaaaatatgaagacgtggtagac

SEQ ID NO: 12909 - DNA, 26 bp, Homo sapiens
gcaaaaatatgaagacgtggtagacg

SEQ ID NO: 12910 - DNA, 26 bp, Homo sapiens
caaaaatatgaagacgtggtagacga

SEQ ID NO: 12911 - DNA, 26 bp, Homo sapiens
aaaaatatgaagacgtggtagacgaa

SEQ ID NO: 12912 - DNA, 26 bp, Homo sapiens
aaaatatgaagacgtggtagacgaag

SEQ ID NO: 12913 - DNA, 26 bp, Homo sapiens
aaatatgaagacgtggtagacgaagg

SEQ ID NO: 12914 - DNA, 26 bp, Homo sapiens
aatatgaagacgtggtagacgaaggc

SEQ ID NO: 12915 - DNA, 26 bp, Homo sapiens
atatgaagacgtggtagacgaaggcc

SEQ ID NO: 12916 - DNA, 26 bp, Homo sapiens
tatgaagacgtggtagacgaaggccc

SEQ ID NO: 12917 - DNA, 26 bp, Homo sapiens
atgaagacgtggtagacgaaggccca

SEQ ID NO: 12918 - DNA, 26 bp, Homo sapiens
tgaagacgtggtagacgaaggcccag

SEQ ID NO: 12919 - DNA, 26 bp, Homo sapiens
gaagacgtggtagacgaaggcccagc

SEQ ID NO: 12920 - DNA, 26 bp, Homo sapiens
aagacgtggtagacgaaggcccagcc

SEQ ID NO: 12921 - DNA, 26 bp, Homo sapiens
agacgtggtagacgaaggcccagccg

SEQ ID NO: 12922 - DNA, 26 bp, Homo sapiens
gacgtggtagacgaaggcccagccgc

SEQ ID NO: 12923 - DNA, 26 bp, Homo sapiens
acgtggtagacgaaggcccagccgcg

SEQ ID NO: 12924 - DNA, 26 bp, Homo sapiens
cgtggtagacgaaggcccagccgcgg

SEQ ID NO: 12925 - DNA, 26 bp, Homo sapiens
gtggtagacgaaggcccagccgcggg

SEQ ID NO: 12926 - DNA, 26 bp, Homo sapiens
tggtagacgaaggcccagccgcgggg

SEQ ID NO: 12927 - DNA, 26 bp, Homo sapiens
ggtagacgaaggcccagccgcggggc

SEQ ID NO: 12928 - DNA, 26 bp, Homo sapiens
gtagacgaaggcccagccgcggggcc

SEQ ID NO: 12929 - DNA, 26 bp, Homo sapiens
tagacgaaggcccagccgcggggccg

SEQ ID NO: 12930 - DNA, 26 bp, Homo sapiens
agacgaaggcccagccgcggggccgc

SEQ ID NO: 12931 - DNA, 26 bp, Homo sapiens
gacgaaggcccagccgcggggccgct

SEQ ID NO: 12932 - DNA, 26 bp, Homo sapiens
acgaaggcccagccgcggggccgctc

SEQ ID NO: 12933 - DNA, 26 bp, Homo sapiens
cgaaggcccagccgcggggccgctcc

SEQ ID NO: 12934 - DNA, 26 bp, Homo sapiens
gaaggcccagccgcggggccgctcca

SEQ ID NO: 12935 - DNA, 26 bp, Homo sapiens
aaggcccagccgcggggccgctccag

SEQ ID NO: 12936 - DNA, 26 bp, Homo sapiens
aggcccagccgcggggccgctccagc

SEQ ID NO: 12937 - DNA, 26 bp, Homo sapiens
ggcccagccgcggggccgctccagca

SEQ ID NO: 12938 - DNA, 26 bp, Homo sapiens
gcccagccgcggggccgctccagcac

SEQ ID NO: 12939 - DNA, 26 bp, Homo sapiens
cccagccgcggggccgctccagcacg

SEQ ID NO: 12940 - DNA, 26 bp, Homo sapiens
ccagccgcggggccgctccagcacgt

SEQ ID NO: 12941 - DNA, 26 bp, Homo sapiens
cagccgcggggccgctccagcacgtt

SEQ ID NO: 12942 - DNA, 26 bp, Homo sapiens
agccgcggggccgctccagcacgttg

SEQ ID NO: 12943 - DNA, 26 bp, Homo sapiens
gccgcggggccgctccagcacgttgt

SEQ ID NO: 12944 - DNA, 26 bp, Homo sapiens
ccgcggggccgctccagcacgttgta

SEQ ID NO: 12945 - DNA, 26 bp, Homo sapiens
cgcggggccgctccagcacgttgtag

SEQ ID NO: 12946 - DNA, 26 bp, Homo sapiens
gcggggccgctccagcacgttgtaga

SEQ ID NO: 12947 - DNA, 26 bp, Homo sapiens
cggggccgctccagcacgttgtagac

SEQ ID NO: 12948 - DNA, 26 bp, Homo sapiens
ggggccgctccagcacgttgtagacc

SEQ ID NO: 12949 - DNA, 26 bp, Homo sapiens
gggccgctccagcacgttgtagaccc

SEQ ID NO: 12950 - DNA, 26 bp, Homo sapiens
ggccgctccagcacgttgtagaccca

SEQ ID NO: 12951 - DNA, 26 bp, Homo sapiens
gccgctccagcacgttgtagacccag

SEQ ID NO: 12952 - DNA, 26 bp, Homo sapiens
ccgctccagcacgttgtagacccagt

SEQ ID NO: 12953 - DNA, 26 bp, Homo sapiens
cgctccagcacgttgtagacccagtt

SEQ ID NO: 12954 - DNA, 26 bp, Homo sapiens
gctccagcacgttgtagacccagttc

SEQ ID NO: 12955 - DNA, 26 bp, Homo sapiens
ctccagcacgttgtagacccagttct

SEQ ID NO: 12956 - DNA, 26 bp, Homo sapiens
tccagcacgttgtagacccagttctg

SEQ ID NO: 12957 - DNA, 26 bp, Homo sapiens
ccagcacgttgtagacccagttctgc

SEQ ID NO: 12958 - DNA, 26 bp, Homo sapiens
cagcacgttgtagacccagttctgca

SEQ ID NO: 12959 - DNA, 26 bp, Homo sapiens
agcacgttgtagacccagttctgcag

SEQ ID NO: 12960 - DNA, 26 bp, Homo sapiens
gcacgttgtagacccagttctgcagg

SEQ ID NO: 12961 - DNA, 26 bp, Homo sapiens
cacgttgtagacccagttctgcaggc

SEQ ID NO: 12962 - DNA, 26 bp, Homo sapiens
acgttgtagacccagttctgcaggcg

SEQ ID NO: 12963 - DNA, 26 bp, Homo sapiens
cgttgtagacccagttctgcaggcgg

SEQ ID NO: 12964 - DNA, 26 bp, Homo sapiens
gttgtagacccagttctgcaggcggc

SEQ ID NO: 12965 - DNA, 26 bp, Homo sapiens
ttgtagacccagttctgcaggcggcg

SEQ ID NO: 12966 - DNA, 26 bp, Homo sapiens
tgtagacccagttctgcaggcggcgg

SEQ ID NO: 12967 - DNA, 26 bp, Homo sapiens
gtagacccagttctgcaggcggcggt

SEQ ID NO: 12968 - DNA, 26 bp, Homo sapiens
tagacccagttctgcaggcggcggta

SEQ ID NO: 12969 - DNA, 26 bp, Homo sapiens
agacccagttctgcaggcggcggtag

SEQ ID NO: 12970 - DNA, 26 bp, Homo sapiens
gacccagttctgcaggcggcggtagc

SEQ ID NO: 12971 - DNA, 26 bp, Homo sapiens
acccagttctgcaggcggcggtagcg

SEQ ID NO: 12972 - DNA, 26 bp, Homo sapiens
cccagttctgcaggcggcggtagcgc

SEQ ID NO: 12973 - DNA, 26 bp, Homo sapiens
ccagttctgcaggcggcggtagcgct

SEQ ID NO: 12974 - DNA, 26 bp, Homo sapiens
cagttctgcaggcggcggtagcgctt

SEQ ID NO: 12975 - DNA, 26 bp, Homo sapiens
agttctgcaggcggcggtagcgcttg

SEQ ID NO: 12976 - DNA, 26 bp, Homo sapiens
gttctgcaggcggcggtagcgcttgt

SEQ ID NO: 12977 - DNA, 26 bp, Homo sapiens
ttctgcaggcggcggtagcgcttgtg

SEQ ID NO: 12978 - DNA, 26 bp, Homo sapiens
tctgcaggcggcggtagcgcttgtgc

SEQ ID NO: 12979 - DNA, 26 bp, Homo sapiens
ctgcaggcggcggtagcgcttgtgcg

SEQ ID NO: 12980 - DNA, 26 bp, Homo sapiens
tgcaggcggcggtagcgcttgtgcgc

SEQ ID NO: 12981 - DNA, 26 bp, Homo sapiens
gcaggcggcggtagcgcttgtgcgcg

SEQ ID NO: 12982 - DNA, 26 bp, Homo sapiens
caggcggcggtagcgcttgtgcgcgg

SEQ ID NO: 12983 - DNA, 26 bp, Homo sapiens
aggcggcggtagcgcttgtgcgcggc

SEQ ID NO: 12984 - DNA, 26 bp, Homo sapiens
ggcggcggtagcgcttgtgcgcggcc

SEQ ID NO: 12985 - DNA, 26 bp, Homo sapiens
gcggcggtagcgcttgtgcgcggccg

SEQ ID NO: 12986 - DNA, 26 bp, Homo sapiens
cggcggtagcgcttgtgcgcggccga

SEQ ID NO: 12987 - DNA, 26 bp, Homo sapiens
ggcggtagcgcttgtgcgcggccgag

SEQ ID NO: 12988 - DNA, 26 bp, Homo sapiens
gcggtagcgcttgtgcgcggccgagg

SEQ ID NO: 12989 - DNA, 26 bp, Homo sapiens
cggtagcgcttgtgcgcggccgagga

SEQ ID NO: 12990 - DNA, 26 bp, Homo sapiens
ggtagcgcttgtgcgcggccgaggag

SEQ ID NO: 12991 - DNA, 26 bp, Homo sapiens
gtagcgcttgtgcgcggccgaggagc

SEQ ID NO: 12992 - DNA, 26 bp, Homo sapiens
tagcgcttgtgcgcggccgaggagcg

SEQ ID NO: 12993 - DNA, 26 bp, Homo sapiens
agcgcttgtgcgcggccgaggagcgc

SEQ ID NO: 12994 - DNA, 26 bp, Homo sapiens
gcgcttgtgcgcggccgaggagcgct

SEQ ID NO: 12995 - DNA, 26 bp, Homo sapiens
cgcttgtgcgcggccgaggagcgctg

SEQ ID NO: 12996 - DNA, 26 bp, Homo sapiens
gcttgtgcgcggccgaggagcgctgg

SEQ ID NO: 12997 - DNA, 26 bp, Homo sapiens
cttgtgcgcggccgaggagcgctggc

SEQ ID NO: 12998 - DNA, 26 bp, Homo sapiens
ttgtgcgcggccgaggagcgctggcc

SEQ ID NO: 12999 - DNA, 26 bp, Homo sapiens
tgtgcgcggccgaggagcgctggccg

SEQ ID NO: 13000 - DNA, 26 bp, Homo sapiens
gtgcgcggccgaggagcgctggccgc

SEQ ID NO: 13001 - DNA, 26 bp, Homo sapiens
tgcgcggccgaggagcgctggccgca

SEQ ID NO: 13002 - DNA, 26 bp, Homo sapiens
gcgcggccgaggagcgctggccgcag

SEQ ID NO: 13003 - DNA, 26 bp, Homo sapiens
cgcggccgaggagcgctggccgcagg

SEQ ID NO: 13004 - DNA, 26 bp, Homo sapiens
gcggccgaggagcgctggccgcaggc

SEQ ID NO: 13005 - DNA, 26 bp, Homo sapiens
cggccgaggagcgctggccgcaggcg

SEQ ID NO: 13006 - DNA, 26 bp, Homo sapiens
ggccgaggagcgctggccgcaggcgg

SEQ ID NO: 13007 - DNA, 26 bp, Homo sapiens
gccgaggagcgctggccgcaggcgga

SEQ ID NO: 13008 - DNA, 26 bp, Homo sapiens
ccgaggagcgctggccgcaggcggag

SEQ ID NO: 13009 - DNA, 26 bp, Homo sapiens
cgaggagcgctggccgcaggcggagc

SEQ ID NO: 13010 - DNA, 26 bp, Homo sapiens
gaggagcgctggccgcaggcggagcc

SEQ ID NO: 13011 - DNA, 26 bp, Homo sapiens
aggagcgctggccgcaggcggagccc

SEQ ID NO: 13012 - DNA, 26 bp, Homo sapiens
ggagcgctggccgcaggcggagcccg

SEQ ID NO: 13013 - DNA, 26 bp, Homo sapiens
gagcgctggccgcaggcggagcccga

SEQ ID NO: 13014 - DNA, 26 bp, Homo sapiens
agcgctggccgcaggcggagcccgag

SEQ ID NO: 13015 - DNA, 26 bp, Homo sapiens
gcgctggccgcaggcggagcccgagc

SEQ ID NO: 13016 - DNA, 26 bp, Homo sapiens
cgctggccgcaggcggagcccgagcc

SEQ ID NO: 13017 - DNA, 26 bp, Homo sapiens
gctggccgcaggcggagcccgagccg

SEQ ID NO: 13018 - DNA, 26 bp, Homo sapiens
ctggccgcaggcggagcccgagccgg

SEQ ID NO: 13019 - DNA, 26 bp, Homo sapiens
tggccgcaggcggagcccgagccgga

SEQ ID NO: 13020 - DNA, 26 bp, Homo sapiens
ggccgcaggcggagcccgagccggag

SEQ ID NO: 13021 - DNA, 26 bp, Homo sapiens
gccgcaggcggagcccgagccggagc

SEQ ID NO: 13022 - DNA, 26 bp, Homo sapiens
ccgcaggcggagcccgagccggagcc

SEQ ID NO: 13023 - DNA, 26 bp, Homo sapiens
cgcaggcggagcccgagccggagccc

SEQ ID NO: 13024 - DNA, 26 bp, Homo sapiens
gcaggcggagcccgagccggagcccg

SEQ ID NO: 13025 - DNA, 26 bp, Homo sapiens
caggcggagcccgagccggagcccgg

SEQ ID NO: 13026 - DNA, 26 bp, Homo sapiens
aggcggagcccgagccggagcccggc

SEQ ID NO: 13027 - DNA, 26 bp, Homo sapiens
ggcggagcccgagccggagcccggcc

SEQ ID NO: 13028 - DNA, 26 bp, Homo sapiens
gcggagcccgagccggagcccggccc

SEQ ID NO: 13029 - DNA, 26 bp, Homo sapiens
cggagcccgagccggagcccggccca

SEQ ID NO: 13030 - DNA, 26 bp, Homo sapiens
ggagcccgagccggagcccggcccag

SEQ ID NO: 13031 - DNA, 26 bp, Homo sapiens
gagcccgagccggagcccggcccagg

SEQ ID NO: 13032 - DNA, 26 bp, Homo sapiens
agcccgagccggagcccggcccaggg

SEQ ID NO: 13033 - DNA, 26 bp, Homo sapiens
gcccgagccggagcccggcccaggga

SEQ ID NO: 13034 - DNA, 26 bp, Homo sapiens
cccgagccggagcccggcccagggag

SEQ ID NO: 13035 - DNA, 26 bp, Homo sapiens
ccgagccggagcccggcccagggagg

SEQ ID NO: 13036 - DNA, 26 bp, Homo sapiens
cgagccggagcccggcccagggaggg

SEQ ID NO: 13037 - DNA, 26 bp, Homo sapiens
gagccggagcccggcccagggagggg

SEQ ID NO: 13038 - DNA, 26 bp, Homo sapiens
agccggagcccggcccagggaggggc

SEQ ID NO: 13039 - DNA, 26 bp, Homo sapiens
gccggagcccggcccagggaggggcg

SEQ ID NO: 13040 - DNA, 26 bp, Homo sapiens
ccggagcccggcccagggaggggcgc

SEQ ID NO: 13041 - DNA, 26 bp, Homo sapiens
cggagcccggcccagggaggggcgcg

SEQ ID NO: 13042 - DNA, 26 bp, Homo sapiens
ggagcccggcccagggaggggcgcgc

SEQ ID NO: 13043 - DNA, 26 bp, Homo sapiens
gagcccggcccagggaggggcgcgcc

SEQ ID NO: 13044 - DNA, 26 bp, Homo sapiens
agcccggcccagggaggggcgcgccc

SEQ ID NO: 13045 - DNA, 26 bp, Homo sapiens
gcccggcccagggaggggcgcgcccg

SEQ ID NO: 13046 - DNA, 26 bp, Homo sapiens
cccggcccagggaggggcgcgcccgg

SEQ ID NO: 13047 - DNA, 26 bp, Homo sapiens
ccggcccagggaggggcgcgcccggc

SEQ ID NO: 13048 - DNA, 26 bp, Homo sapiens
cggcccagggaggggcgcgcccggcg

SEQ ID NO: 13049 - DNA, 26 bp, Homo sapiens
ggcccagggaggggcgcgcccggcgg

SEQ ID NO: 13050 - DNA, 26 bp, Homo sapiens
gcccagggaggggcgcgcccggcggc

SEQ ID NO: 13051 - DNA, 26 bp, Homo sapiens
cccagggaggggcgcgcccggcggca

SEQ ID NO: 13052 - DNA, 26 bp, Homo sapiens
ccagggaggggcgcgcccggcggcag

SEQ ID NO: 13053 - DNA, 26 bp, Homo sapiens
cagggaggggcgcgcccggcggcagg

SEQ ID NO: 13054 - DNA, 26 bp, Homo sapiens
agggaggggcgcgcccggcggcaggg

SEQ ID NO: 13055 - DNA, 26 bp, Homo sapiens
gggaggggcgcgcccggcggcagggg

SEQ ID NO: 13056 - DNA, 26 bp, Homo sapiens
ggaggggcgcgcccggcggcaggggg

SEQ ID NO: 13057 - DNA, 26 bp, Homo sapiens
gaggggcgcgcccggcggcagggggc

SEQ ID NO: 13058 - DNA, 26 bp, Homo sapiens
aggggcgcgcccggcggcagggggct

SEQ ID NO: 13059 - DNA, 26 bp, Homo sapiens
ggggcgcgcccggcggcagggggctg

SEQ ID NO: 13060 - DNA, 26 bp, Homo sapiens
gggcgcgcccggcggcagggggctgc

SEQ ID NO: 13061 - DNA, 26 bp, Homo sapiens
ggcgcgcccggcggcagggggctgcc

SEQ ID NO: 13062 - DNA, 26 bp, Homo sapiens
gcgcgcccggcggcagggggctgccc

SEQ ID NO: 13063 - DNA, 26 bp, Homo sapiens
cgcgcccggcggcagggggctgccca

SEQ ID NO: 13064 - DNA, 26 bp, Homo sapiens
gcgcccggcggcagggggctgcccag

SEQ ID NO: 13065 - DNA, 26 bp, Homo sapiens
cgcccggcggcagggggctgcccagg

SEQ ID NO: 13066 - DNA, 26 bp, Homo sapiens
gcccggcggcagggggctgcccagga

SEQ ID NO: 13067 - DNA, 26 bp, Homo sapiens
cccggcggcagggggctgcccaggag

SEQ ID NO: 13068 - DNA, 26 bp, Homo sapiens
ccggcggcagggggctgcccaggagg

SEQ ID NO: 13069 - DNA, 26 bp, Homo sapiens
cggcggcagggggctgcccaggaggc

SEQ ID NO: 13070 - DNA, 26 bp, Homo sapiens
ggcggcagggggctgcccaggaggcc

SEQ ID NO: 13071 - DNA, 26 bp, Homo sapiens
gcggcagggggctgcccaggaggccg

SEQ ID NO: 13072 - DNA, 26 bp, Homo sapiens
cggcagggggctgcccaggaggccga

SEQ ID NO: 13073 - DNA, 26 bp, Homo sapiens
ggcagggggctgcccaggaggccgag

SEQ ID NO: 13074 - DNA, 26 bp, Homo sapiens
gcagggggctgcccaggaggccgagg

SEQ ID NO: 13075 - DNA, 26 bp, Homo sapiens
cagggggctgcccaggaggccgaggc

SEQ ID NO: 13076 - DNA, 26 bp, Homo sapiens
agggggctgcccaggaggccgaggcg

SEQ ID NO: 13077 - DNA, 26 bp, Homo sapiens
gggggctgcccaggaggccgaggcgg

SEQ ID NO: 13078 - DNA, 26 bp, Homo sapiens
ggggctgcccaggaggccgaggcggc

SEQ ID NO: 13079 - DNA, 26 bp, Homo sapiens
gggctgcccaggaggccgaggcggcg

SEQ ID NO: 13080 - DNA, 26 bp, Homo sapiens
ggctgcccaggaggccgaggcggcgc

SEQ ID NO: 13081 - DNA, 26 bp, Homo sapiens
gctgcccaggaggccgaggcggcgcg

SEQ ID NO: 13082 - DNA, 26 bp, Homo sapiens
ctgcccaggaggccgaggcggcgcgg

SEQ ID NO: 13083 - DNA, 26 bp, Homo sapiens
tgcccaggaggccgaggcggcgcggg

SEQ ID NO: 13084 - DNA, 26 bp, Homo sapiens
gcccaggaggccgaggcggcgcgggg

SEQ ID NO: 13085 - DNA, 26 bp, Homo sapiens
cccaggaggccgaggcggcgcgggga

SEQ ID NO: 13086 - DNA, 26 bp, Homo sapiens
ccaggaggccgaggcggcgcggggag

SEQ ID NO: 13087 - DNA, 26 bp, Homo sapiens
caggaggccgaggcggcgcggggagc

SEQ ID NO: 13088 - DNA, 26 bp, Homo sapiens
aggaggccgaggcggcgcggggagcc

SEQ ID NO: 13089 - DNA, 26 bp, Homo sapiens
ggaggccgaggcggcgcggggagccg

SEQ ID NO: 13090 - DNA, 26 bp, Homo sapiens
gaggccgaggcggcgcggggagccgc

SEQ ID NO: 13091 - DNA, 26 bp, Homo sapiens
aggccgaggcggcgcggggagccgcc

SEQ ID NO: 13092 - DNA, 26 bp, Homo sapiens
ggccgaggcggcgcggggagccgccc

SEQ ID NO: 13093 - DNA, 26 bp, Homo sapiens
gccgaggcggcgcggggagccgcccc

SEQ ID NO: 13094 - DNA, 26 bp, Homo sapiens
ccgaggcggcgcggggagccgccccc

SEQ ID NO: 13095 - DNA, 26 bp, Homo sapiens
cgaggcggcgcggggagccgcccccg

SEQ ID NO: 13096 - DNA, 26 bp, Homo sapiens
gaggcggcgcggggagccgcccccgc

SEQ ID NO: 13097 - DNA, 26 bp, Homo sapiens
aggcggcgcggggagccgcccccgcc

SEQ ID NO: 13098 - DNA, 26 bp, Homo sapiens
ggcggcgcggggagccgcccccgccc

SEQ ID NO: 13099 - DNA, 26 bp, Homo sapiens
gcggcgcggggagccgcccccgcccg

SEQ ID NO: 13100 - DNA, 26 bp, Homo sapiens
cggcgcggggagccgcccccgcccgc

SEQ ID NO: 13101 - DNA, 26 bp, Homo sapiens
ggcgcggggagccgcccccgcccgcc

SEQ ID NO: 13102 - DNA, 26 bp, Homo sapiens
gcgcggggagccgcccccgcccgcct

SEQ ID NO: 13103 - DNA, 26 bp, Homo sapiens
cgcggggagccgcccccgcccgcctc

SEQ ID NO: 13104 - DNA, 26 bp, Homo sapiens
gcggggagccgcccccgcccgcctcg

SEQ ID NO: 13105 - DNA, 26 bp, Homo sapiens
cggggagccgcccccgcccgcctcgc

SEQ ID NO: 13106 - DNA, 26 bp, Homo sapiens
ggggagccgcccccgcccgcctcgcc

SEQ ID NO: 13107 - DNA, 26 bp, Homo sapiens
gggagccgcccccgcccgcctcgccc

SEQ ID NO: 13108 - DNA, 26 bp, Homo sapiens
ggagccgcccccgcccgcctcgccct

SEQ ID NO: 13109 - DNA, 26 bp, Homo sapiens
gagccgcccccgcccgcctcgccctg

SEQ ID NO: 13110 - DNA, 26 bp, Homo sapiens
agccgcccccgcccgcctcgccctgt

SEQ ID NO: 13111 - DNA, 26 bp, Homo sapiens
gccgcccccgcccgcctcgccctgtt

SEQ ID NO: 13112 - DNA, 26 bp, Homo sapiens
ccgcccccgcccgcctcgccctgttc

SEQ ID NO: 13113 - DNA, 26 bp, Homo sapiens
cgcccccgcccgcctcgccctgttcg

SEQ ID NO: 13114 - DNA, 26 bp, Homo sapiens
gcccccgcccgcctcgccctgttcgc

SEQ ID NO: 13115 - DNA, 26 bp, Homo sapiens
cccccgcccgcctcgccctgttcgct

SEQ ID NO: 13116 - DNA, 26 bp, Homo sapiens
ccccgcccgcctcgccctgttcgctc

SEQ ID NO: 13117 - DNA, 26 bp, Homo sapiens
cccgcccgcctcgccctgttcgctct

SEQ ID NO: 13118 - DNA, 26 bp, Homo sapiens
ccgcccgcctcgccctgttcgctctg

SEQ ID NO: 13119 - DNA, 26 bp, Homo sapiens
cgcccgcctcgccctgttcgctctgc

SEQ ID NO: 13120 - DNA, 26 bp, Homo sapiens
gcccgcctcgccctgttcgctctgca

SEQ ID NO: 13121 - DNA, 26 bp, Homo sapiens
cccgcctcgccctgttcgctctgcac

SEQ ID NO: 13122 - DNA, 26 bp, Homo sapiens
ccgcctcgccctgttcgctctgcacg

SEQ ID NO: 13123 - DNA, 26 bp, Homo sapiens
cgcctcgccctgttcgctctgcacgg

SEQ ID NO: 13124 - DNA, 26 bp, Homo sapiens
gcctcgccctgttcgctctgcacggc

SEQ ID NO: 13125 - DNA, 26 bp, Homo sapiens
cctcgccctgttcgctctgcacggcc

SEQ ID NO: 13126 - DNA, 26 bp, Homo sapiens
ctcgccctgttcgctctgcacggccg

SEQ ID NO: 13127 - DNA, 26 bp, Homo sapiens
tcgccctgttcgctctgcacggccgt

SEQ ID NO: 13128 - DNA, 26 bp, Homo sapiens
cgccctgttcgctctgcacggccgtg

SEQ ID NO: 13129 - DNA, 26 bp, Homo sapiens
gccctgttcgctctgcacggccgtga

SEQ ID NO: 13130 - DNA, 26 bp, Homo sapiens
ccctgttcgctctgcacggccgtgag

SEQ ID NO: 13131 - DNA, 26 bp, Homo sapiens
cctgttcgctctgcacggccgtgagc

SEQ ID NO: 13132 - DNA, 26 bp, Homo sapiens
ctgttcgctctgcacggccgtgagcg

SEQ ID NO: 13133 - DNA, 26 bp, Homo sapiens
tgttcgctctgcacggccgtgagcgc

SEQ ID NO: 13134 - DNA, 26 bp, Homo sapiens
gttcgctctgcacggccgtgagcgcc

SEQ ID NO: 13135 - DNA, 26 bp, Homo sapiens
ttcgctctgcacggccgtgagcgcca

SEQ ID NO: 13136 - DNA, 26 bp, Homo sapiens
tcgctctgcacggccgtgagcgccac

SEQ ID NO: 13137 - DNA, 26 bp, Homo sapiens
cgctctgcacggccgtgagcgccact

SEQ ID NO: 13138 - DNA, 26 bp, Homo sapiens
gctctgcacggccgtgagcgccacta

SEQ ID NO: 13139 - DNA, 26 bp, Homo sapiens
ctctgcacggccgtgagcgccactag

SEQ ID NO: 13140 - DNA, 26 bp, Homo sapiens
tctgcacggccgtgagcgccactagc

SEQ ID NO: 13141 - DNA, 26 bp, Homo sapiens
ctgcacggccgtgagcgccactagct

SEQ ID NO: 13142 - DNA, 26 bp, Homo sapiens
tgcacggccgtgagcgccactagctc

SEQ ID NO: 13143 - DNA, 26 bp, Homo sapiens
gcacggccgtgagcgccactagctcc

SEQ ID NO: 13144 - DNA, 26 bp, Homo sapiens
cacggccgtgagcgccactagctccg

SEQ ID NO: 13145 - DNA, 26 bp, Homo sapiens
acggccgtgagcgccactagctccgc

SEQ ID NO: 13146 - DNA, 26 bp, Homo sapiens
cggccgtgagcgccactagctccgcg

SEQ ID NO: 13147 - DNA, 26 bp, Homo sapiens
ggccgtgagcgccactagctccgcgc

SEQ ID NO: 13148 - DNA, 26 bp, Homo sapiens
gccgtgagcgccactagctccgcgcg

SEQ ID NO: 13149 - DNA, 26 bp, Homo sapiens
ccgtgagcgccactagctccgcgcgg

SEQ ID NO: 13150 - DNA, 26 bp, Homo sapiens
cgtgagcgccactagctccgcgcggg

SEQ ID NO: 13151 - DNA, 26 bp, Homo sapiens
gtgagcgccactagctccgcgcgggg

SEQ ID NO: 13152 - DNA, 26 bp, Homo sapiens
tgagcgccactagctccgcgcggggg

SEQ ID NO: 13153 - DNA, 26 bp, Homo sapiens
gagcgccactagctccgcgcgggggg

SEQ ID NO: 13154 - DNA, 26 bp, Homo sapiens
agcgccactagctccgcgcggggggc

SEQ ID NO: 13155 - DNA, 26 bp, Homo sapiens
gcgccactagctccgcgcggggggcg

SEQ ID NO: 13156 - DNA, 26 bp, Homo sapiens
cgccactagctccgcgcggggggcgt

SEQ ID NO: 13157 - DNA, 26 bp, Homo sapiens
gccactagctccgcgcggggggcgtc

SEQ ID NO: 13158 - DNA, 26 bp, Homo sapiens
ccactagctccgcgcggggggcgtcc

SEQ ID NO: 13159 - DNA, 26 bp, Homo sapiens
cactagctccgcgcggggggcgtccc

SEQ ID NO: 13160 - DNA, 26 bp, Homo sapiens
actagctccgcgcggggggcgtcccc

SEQ ID NO: 13161 - DNA, 26 bp, Homo sapiens
ctagctccgcgcggggggcgtccccg

SEQ ID NO: 13162 - DNA, 26 bp, Homo sapiens
tagctccgcgcggggggcgtccccgg

SEQ ID NO: 13163 - DNA, 26 bp, Homo sapiens
agctccgcgcggggggcgtccccggg

SEQ ID NO: 13164 - DNA, 26 bp, Homo sapiens
gctccgcgcggggggcgtccccgggc

SEQ ID NO: 13165 - DNA, 26 bp, Homo sapiens
ctccgcgcggggggcgtccccgggcg

SEQ ID NO: 13166 - DNA, 26 bp, Homo sapiens
tccgcgcggggggcgtccccgggcgg

SEQ ID NO: 13167 - DNA, 26 bp, Homo sapiens
ccgcgcggggggcgtccccgggcggg

SEQ ID NO: 13168 - DNA, 26 bp, Homo sapiens
cgcgcggggggcgtccccgggcgggg

SEQ ID NO: 13169 - DNA, 26 bp, Homo sapiens
gcgcggggggcgtccccgggcggggg

SEQ ID NO: 13170 - DNA, 26 bp, Homo sapiens
cgcggggggcgtccccgggcggggga

SEQ ID NO: 13171 - DNA, 26 bp, Homo sapiens
gcggggggcgtccccgggcgggggac

SEQ ID NO: 13172 - DNA, 26 bp, Homo sapiens
cggggggcgtccccgggcgggggacc

SEQ ID NO: 13173 - DNA, 26 bp, Homo sapiens
ggggggcgtccccgggcgggggaccc

SEQ ID NO: 13174 - DNA, 26 bp, Homo sapiens
gggggcgtccccgggcgggggaccca

SEQ ID NO: 13175 - DNA, 26 bp, Homo sapiens
ggggcgtccccgggcgggggacccag

SEQ ID NO: 13176 - DNA, 26 bp, Homo sapiens
gggcgtccccgggcgggggacccagg

SEQ ID NO: 13177 - DNA, 26 bp, Homo sapiens
ggcgtccccgggcgggggacccaggc

SEQ ID NO: 13178 - DNA, 26 bp, Homo sapiens
gcgtccccgggcgggggacccaggcc

SEQ ID NO: 13179 - DNA, 26 bp, Homo sapiens
cgtccccgggcgggggacccaggccg

SEQ ID NO: 13180 - DNA, 26 bp, Homo sapiens
gtccccgggcgggggacccaggccga

SEQ ID NO: 13181 - DNA, 26 bp, Homo sapiens
tccccgggcgggggacccaggccgag

SEQ ID NO: 13182 - DNA, 26 bp, Homo sapiens
ccccgggcgggggacccaggccgagg

SEQ ID NO: 13183 - DNA, 26 bp, Homo sapiens
cccgggcgggggacccaggccgaggc

SEQ ID NO: 13184 - DNA, 26 bp, Homo sapiens
ccgggcgggggacccaggccgaggcg

SEQ ID NO: 13185 - DNA, 26 bp, Homo sapiens
cgggcgggggacccaggccgaggcgg

SEQ ID NO: 13186 - DNA, 26 bp, Homo sapiens
gggcgggggacccaggccgaggcggc

SEQ ID NO: 13187 - DNA, 26 bp, Homo sapiens
ggcgggggacccaggccgaggcggcg

SEQ ID NO: 13188 - DNA, 26 bp, Homo sapiens
gcgggggacccaggccgaggcggcgc

SEQ ID NO: 13189 - DNA, 26 bp, Homo sapiens
cgggggacccaggccgaggcggcgcg

SEQ ID NO: 13190 - DNA, 26 bp, Homo sapiens
gggggacccaggccgaggcggcgcgg

SEQ ID NO: 13191 - DNA, 26 bp, Homo sapiens
ggggacccaggccgaggcggcgcggg

SEQ ID NO: 13192 - DNA, 26 bp, Homo sapiens
gggacccaggccgaggcggcgcgggg

SEQ ID NO: 13193 - DNA, 26 bp, Homo sapiens
ggacccaggccgaggcggcgcggggg

SEQ ID NO: 13194 - DNA, 26 bp, Homo sapiens
gacccaggccgaggcggcgcgggggg

SEQ ID NO: 13195 - DNA, 26 bp, Homo sapiens
acccaggccgaggcggcgcggggggg

SEQ ID NO: 13196 - DNA, 26 bp, Homo sapiens
cccaggccgaggcggcgcgggggggc

SEQ ID NO: 13197 - DNA, 26 bp, Homo sapiens
ccaggccgaggcggcgcgggggggcc

SEQ ID NO: 13198 - DNA, 26 bp, Homo sapiens
caggccgaggcggcgcgggggggcct

SEQ ID NO: 13199 - DNA, 26 bp, Homo sapiens
aggccgaggcggcgcgggggggcctc

SEQ ID NO: 13200 - DNA, 26 bp, Homo sapiens
ggccgaggcggcgcgggggggcctcg

SEQ ID NO: 13201 - DNA, 26 bp, Homo sapiens
gccgaggcggcgcgggggggcctcgg

SEQ ID NO: 13202 - DNA, 26 bp, Homo sapiens
ccgaggcggcgcgggggggcctcggc

SEQ ID NO: 13203 - DNA, 26 bp, Homo sapiens
cgaggcggcgcgggggggcctcggcc

SEQ ID NO: 13204 - DNA, 26 bp, Homo sapiens
gaggcggcgcgggggggcctcggcca

SEQ ID NO: 13205 - DNA, 26 bp, Homo sapiens
aggcggcgcgggggggcctcggccat

SEQ ID NO: 13206 - DNA, 26 bp, Homo sapiens
ggcggcgcgggggggcctcggccatg

SEQ ID NO: 13207 - DNA, 26 bp, Homo sapiens
gcggcgcgggggggcctcggccatgg

SEQ ID NO: 13208 - DNA, 26 bp, Homo sapiens
cggcgcgggggggcctcggccatggg

SEQ ID NO: 13209 - DNA, 26 bp, Homo sapiens
ggcgcgggggggcctcggccatgggc

SEQ ID NO: 13210 - DNA, 26 bp, Homo sapiens
gcgcgggggggcctcggccatgggcg

SEQ ID NO: 13211 - DNA, 26 bp, Homo sapiens
cgcgggggggcctcggccatgggcgg

SEQ ID NO: 13212 - DNA, 26 bp, Homo sapiens
gcgggggggcctcggccatgggcggc

SEQ ID NO: 13213 - DNA, 26 bp, Homo sapiens
cgggggggcctcggccatgggcggcg

SEQ ID NO: 13214 - DNA, 26 bp, Homo sapiens
gggggggcctcggccatgggcggcgc

SEQ ID NO: 13215 - DNA, 26 bp, Homo sapiens
ggggggcctcggccatgggcggcgcc

SEQ ID NO: 13216 - DNA, 26 bp, Homo sapiens
gggggcctcggccatgggcggcgccg

SEQ ID NO: 13217 - DNA, 26 bp, Homo sapiens
ggggcctcggccatgggcggcgccgg

SEQ ID NO: 13218 - DNA, 26 bp, Homo sapiens
gggcctcggccatgggcggcgccggg

SEQ ID NO: 13219 - DNA, 26 bp, Homo sapiens
ggcctcggccatgggcggcgccgggc

SEQ ID NO: 13220 - DNA, 26 bp, Homo sapiens
gcctcggccatgggcggcgccgggct

SEQ ID NO: 13221 - DNA, 26 bp, Homo sapiens
cctcggccatgggcggcgccgggctg

SEQ ID NO: 13222 - DNA, 26 bp, Homo sapiens
ctcggccatgggcggcgccgggctgg

SEQ ID NO: 13223 - DNA, 26 bp, Homo sapiens
tcggccatgggcggcgccgggctggg

SEQ ID NO: 13224 - DNA, 26 bp, Homo sapiens
cggccatgggcggcgccgggctgggg

SEQ ID NO: 13225 - DNA, 26 bp, Homo sapiens
ggccatgggcggcgccgggctggggg

SEQ ID NO: 13226 - DNA, 26 bp, Homo sapiens
gccatgggcggcgccgggctgggggc

SEQ ID NO: 13227 - DNA, 26 bp, Homo sapiens
ccatgggcggcgccgggctgggggcg

SEQ ID NO: 13228 - DNA, 26 bp, Homo sapiens
catgggcggcgccgggctgggggcgc

SEQ ID NO: 13229 - DNA, 26 bp, Homo sapiens
atgggcggcgccgggctgggggcgcc

SEQ ID NO: 13230 - DNA, 26 bp, Homo sapiens
tgggcggcgccgggctgggggcgccg

SEQ ID NO: 13231 - DNA, 26 bp, Homo sapiens
gggcggcgccgggctgggggcgccgg

SEQ ID NO: 13232 - DNA, 26 bp, Homo sapiens
ggcggcgccgggctgggggcgccggg

SEQ ID NO: 13233 - DNA, 26 bp, Homo sapiens
gcggcgccgggctgggggcgccgggg

SEQ ID NO: 13234 - DNA, 26 bp, Homo sapiens
cggcgccgggctgggggcgccggggc

SEQ ID NO: 13235 - DNA, 26 bp, Homo sapiens
ggcgccgggctgggggcgccggggcc

SEQ ID NO: 13236 - DNA, 26 bp, Homo sapiens
gcgccgggctgggggcgccggggccc

SEQ ID NO: 13237 - DNA, 26 bp, Homo sapiens
cgccgggctgggggcgccggggcccg

SEQ ID NO: 13238 - DNA, 26 bp, Homo sapiens
gccgggctgggggcgccggggcccgg

SEQ ID NO: 13239 - DNA, 26 bp, Homo sapiens
ccgggctgggggcgccggggcccggg

SEQ ID NO: 13240 - DNA, 26 bp, Homo sapiens
cgggctgggggcgccggggcccgggc

SEQ ID NO: 13241 - DNA, 26 bp, Homo sapiens
gggctgggggcgccggggcccgggca

SEQ ID NO: 13242 - DNA, 26 bp, Homo sapiens
ggctgggggcgccggggcccgggcac

SEQ ID NO: 13243 - DNA, 26 bp, Homo sapiens
gctgggggcgccggggcccgggcacg

SEQ ID NO: 13244 - DNA, 26 bp, Homo sapiens
ctgggggcgccggggcccgggcacgg

SEQ ID NO: 13245 - DNA, 26 bp, Homo sapiens
tgggggcgccggggcccgggcacggt

SEQ ID NO: 13246 - DNA, 26 bp, Homo sapiens
gggggcgccggggcccgggcacggtc

SEQ ID NO: 13247 - DNA, 26 bp, Homo sapiens
ggggcgccggggcccgggcacggtcc

SEQ ID NO: 13248 - DNA, 26 bp, Homo sapiens
gggcgccggggcccgggcacggtccg

SEQ ID NO: 13249 - DNA, 26 bp, Homo sapiens
ggcgccggggcccgggcacggtccgg

SEQ ID NO: 13250 - DNA, 26 bp, Homo sapiens
gcgccggggcccgggcacggtccggg

SEQ ID NO: 13251 - DNA, 26 bp, Homo sapiens
cgccggggcccgggcacggtccgggg

SEQ ID NO: 13252 - DNA, 26 bp, Homo sapiens
gccggggcccgggcacggtccggggc

SEQ ID NO: 13253 - DNA, 26 bp, Homo sapiens
ccggggcccgggcacggtccggggcg

SEQ ID NO: 13254 - DNA, 26 bp, Homo sapiens
cggggcccgggcacggtccggggcgg

SEQ ID NO: 13255 - DNA, 26 bp, Homo sapiens
ggggcccgggcacggtccggggcggg

SEQ ID NO: 13256 - DNA, 26 bp, Homo sapiens
gggcccgggcacggtccggggcgggg

SEQ ID NO: 13257 - DNA, 26 bp, Homo sapiens
ggcccgggcacggtccggggcggggg

SEQ ID NO: 13258 - DNA, 26 bp, Homo sapiens
gcccgggcacggtccggggcgggggc

SEQ ID NO: 13259 - DNA, 26 bp, Homo sapiens
cccgggcacggtccggggcgggggcg

SEQ ID NO: 13260 - DNA, 26 bp, Homo sapiens
ccgggcacggtccggggcgggggcgc

SEQ ID NO: 13261 - DNA, 26 bp, Homo sapiens
cgggcacggtccggggcgggggcgcg

SEQ ID NO: 13262 - DNA, 26 bp, Homo sapiens
gggcacggtccggggcgggggcgcgc

SEQ ID NO: 13263 - DNA, 26 bp, Homo sapiens
ggcacggtccggggcgggggcgcgct

SEQ ID NO: 13264 - DNA, 26 bp, Homo sapiens
gcacggtccggggcgggggcgcgctc

SEQ ID NO: 13265 - DNA, 26 bp, Homo sapiens
cacggtccggggcgggggcgcgctcg

SEQ ID NO: 13266 - DNA, 26 bp, Homo sapiens
acggtccggggcgggggcgcgctcgg

SEQ ID NO: 13267 - DNA, 26 bp, Homo sapiens
cggtccggggcgggggcgcgctcggg

SEQ ID NO: 13268 - DNA, 26 bp, Homo sapiens
ggtccggggcgggggcgcgctcgggg

SEQ ID NO: 13269 - DNA, 26 bp, Homo sapiens
gtccggggcgggggcgcgctcggggc

SEQ ID NO: 13270 - DNA, 26 bp, Homo sapiens
tccggggcgggggcgcgctcggggcg

SEQ ID NO: 13271 - DNA, 26 bp, Homo sapiens
ccggggcgggggcgcgctcggggcgc

SEQ ID NO: 13272 - DNA, 26 bp, Homo sapiens
cggggcgggggcgcgctcggggcgct

SEQ ID NO: 13273 - DNA, 26 bp, Homo sapiens
ggggcgggggcgcgctcggggcgctc

SEQ ID NO: 13274 - DNA, 26 bp, Homo sapiens
gggcgggggcgcgctcggggcgctca

SEQ ID NO: 13275 - DNA, 26 bp, Homo sapiens
ggcgggggcgcgctcggggcgctcag

SEQ ID NO: 13276 - DNA, 26 bp, Homo sapiens
gcgggggcgcgctcggggcgctcaga

SEQ ID NO: 13277 - DNA, 26 bp, Homo sapiens
cgggggcgcgctcggggcgctcagag

SEQ ID NO: 13278 - DNA, 26 bp, Homo sapiens
gggggcgcgctcggggcgctcagaga

SEQ ID NO: 13279 - DNA, 26 bp, Homo sapiens
ggggcgcgctcggggcgctcagagac

SEQ ID NO: 13280 - DNA, 26 bp, Homo sapiens
gggcgcgctcggggcgctcagagacg

SEQ ID NO: 13281 - DNA, 26 bp, Homo sapiens
ggcgcgctcggggcgctcagagacgc

SEQ ID NO: 13282 - DNA, 26 bp, Homo sapiens
gcgcgctcggggcgctcagagacgca

SEQ ID NO: 13283 - DNA, 26 bp, Homo sapiens
cgcgctcggggcgctcagagacgcat

SEQ ID NO: 13284 - DNA, 26 bp, Homo sapiens
gcgctcggggcgctcagagacgcatg

SEQ ID NO: 13285 - DNA, 26 bp, Homo sapiens
cgctcggggcgctcagagacgcatgg

SEQ ID NO: 13286 - DNA, 26 bp, Homo sapiens
gctcggggcgctcagagacgcatggc

SEQ ID NO: 13287 - DNA, 26 bp, Homo sapiens
ctcggggcgctcagagacgcatggct

SEQ ID NO: 13288 - DNA, 26 bp, Homo sapiens
tcggggcgctcagagacgcatggctc

SEQ ID NO: 13289 - DNA, 26 bp, Homo sapiens
cggggcgctcagagacgcatggctcg

SEQ ID NO: 13290 - DNA, 26 bp, Homo sapiens
ggggcgctcagagacgcatggctcgg

SEQ ID NO: 13291 - DNA, 26 bp, Homo sapiens
gggcgctcagagacgcatggctcgga

SEQ ID NO: 13292 - DNA, 26 bp, Homo sapiens
ggcgctcagagacgcatggctcggac

SEQ ID NO: 13293 - DNA, 26 bp, Homo sapiens
gcgctcagagacgcatggctcggacc

SEQ ID NO: 13294 - DNA, 26 bp, Homo sapiens
cgctcagagacgcatggctcggaccc

SEQ ID NO: 13295 - DNA, 26 bp, Homo sapiens
gctcagagacgcatggctcggacccg

SEQ ID NO: 13296 - DNA, 26 bp, Homo sapiens
ctcagagacgcatggctcggacccgg

SEQ ID NO: 13297 - DNA, 26 bp, Homo sapiens
tcagagacgcatggctcggacccggg

SEQ ID NO: 13298 - DNA, 26 bp, Homo sapiens
cagagacgcatggctcggacccgggg

SEQ ID NO: 13299 - DNA, 26 bp, Homo sapiens
agagacgcatggctcggacccggggc

SEQ ID NO: 13300 - DNA, 26 bp, Homo sapiens
gagacgcatggctcggacccggggcc

SEQ ID NO: 13301 - DNA, 26 bp, Homo sapiens
agacgcatggctcggacccggggcca

SEQ ID NO: 13302 - DNA, 26 bp, Homo sapiens
gacgcatggctcggacccggggccag

SEQ ID NO: 13303 - DNA, 26 bp, Homo sapiens
acgcatggctcggacccggggccaga

SEQ ID NO: 13304 - DNA, 26 bp, Homo sapiens
cgcatggctcggacccggggccagag

SEQ ID NO: 13305 - DNA, 26 bp, Homo sapiens
gcatggctcggacccggggccagagg

SEQ ID NO: 13306 - DNA, 26 bp, Homo sapiens
catggctcggacccggggccagaggg

SEQ ID NO: 13307 - DNA, 26 bp, Homo sapiens
atggctcggacccggggccagagggg

SEQ ID NO: 13308 - DNA, 26 bp, Homo sapiens
tggctcggacccggggccagaggggc

SEQ ID NO: 13309 - DNA, 26 bp, Homo sapiens
ggctcggacccggggccagaggggcg

SEQ ID NO: 13310 - DNA, 26 bp, Homo sapiens
gctcggacccggggccagaggggcga

SEQ ID NO: 13311 - DNA, 26 bp, Homo sapiens
ctcggacccggggccagaggggcgac

SEQ ID NO: 13312 - DNA, 26 bp, Homo sapiens
tcggacccggggccagaggggcgacc

SEQ ID NO: 13313 - DNA, 26 bp, Homo sapiens
cggacccggggccagaggggcgaccc

SEQ ID NO: 13314 - DNA, 26 bp, Homo sapiens
ggacccggggccagaggggcgacccg

SEQ ID NO: 13315 - DNA, 26 bp, Homo sapiens
gacccggggccagaggggcgacccgg

SEQ ID NO: 13316 - DNA, 26 bp, Homo sapiens
acccggggccagaggggcgacccggg

SEQ ID NO: 13317 - DNA, 26 bp, Homo sapiens
cccggggccagaggggcgacccgggg

SEQ ID NO: 13318 - DNA, 26 bp, Homo sapiens
ccggggccagaggggcgacccggggc

SEQ ID NO: 13319 - DNA, 26 bp, Homo sapiens
cggggccagaggggcgacccggggcg

SEQ ID NO: 13320 - DNA, 26 bp, Homo sapiens
ggggccagaggggcgacccggggcgg

SEQ ID NO: 13321 - DNA, 26 bp, Homo sapiens
gggccagaggggcgacccggggcggg

SEQ ID NO: 13322 - DNA, 26 bp, Homo sapiens
ggccagaggggcgacccggggcgggc

SEQ ID NO: 13323 - DNA, 26 bp, Homo sapiens
gccagaggggcgacccggggcgggcg

SEQ ID NO: 13324 - DNA, 26 bp, Homo sapiens
ccagaggggcgacccggggcgggcgc

SEQ ID NO: 13325 - DNA, 26 bp, Homo sapiens
cagaggggcgacccggggcgggcgcg

SEQ ID NO: 13326 - DNA, 26 bp, Homo sapiens
agaggggcgacccggggcgggcgcgg

SEQ ID NO: 13327 - DNA, 26 bp, Homo sapiens
gaggggcgacccggggcgggcgcggg

SEQ ID NO: 13328 - DNA, 26 bp, Homo sapiens
aggggcgacccggggcgggcgcgggc

SEQ ID NO: 13329 - DNA, 26 bp, Homo sapiens
ggggcgacccggggcgggcgcgggcg

SEQ ID NO: 13330 - DNA, 26 bp, Homo sapiens
gggcgacccggggcgggcgcgggcgg

SEQ ID NO: 13331 - DNA, 26 bp, Homo sapiens
ggcgacccggggcgggcgcgggcggc

SEQ ID NO: 13332 - DNA, 26 bp, Homo sapiens
gcgacccggggcgggcgcgggcggcg

SEQ ID NO: 13333 - DNA, 26 bp, Homo sapiens
cgacccggggcgggcgcgggcggcgg

SEQ ID NO: 13334 - DNA, 26 bp, Homo sapiens
gacccggggcgggcgcgggcggcggg

SEQ ID NO: 13335 - DNA, 26 bp, Homo sapiens
acccggggcgggcgcgggcggcgggg

SEQ ID NO: 13336 - DNA, 26 bp, Homo sapiens
cccggggcgggcgcgggcggcggggg

SEQ ID NO: 13337 - DNA, 26 bp, Homo sapiens
ccggggcgggcgcgggcggcgggggc

SEQ ID NO: 13338 - DNA, 26 bp, Homo sapiens
cggggcgggcgcgggcggcgggggct

SEQ ID NO: 13339 - DNA, 26 bp, Homo sapiens
ggggcgggcgcgggcggcgggggcta

SEQ ID NO: 13340 - DNA, 26 bp, Homo sapiens
gggcgggcgcgggcggcgggggctag

SEQ ID NO: 13341 - DNA, 26 bp, Homo sapiens
ggcgggcgcgggcggcgggggctagg

SEQ ID NO: 13342 - DNA, 26 bp, Homo sapiens
gcgggcgcgggcggcgggggctaggg

SEQ ID NO: 13343 - DNA, 26 bp, Homo sapiens
cgggcgcgggcggcgggggctagggg

SEQ ID NO: 13344 - DNA, 26 bp, Homo sapiens
gggcgcgggcggcgggggctaggggc

SEQ ID NO: 13345 - DNA, 26 bp, Homo sapiens
ggcgcgggcggcgggggctaggggcc

SEQ ID NO: 13346 - DNA, 26 bp, Homo sapiens
gcgcgggcggcgggggctaggggccg

SEQ ID NO: 13347 - DNA, 26 bp, Homo sapiens
cgcgggcggcgggggctaggggccgg

SEQ ID NO: 13348 - DNA, 26 bp, Homo sapiens
gcgggcggcgggggctaggggccggg

SEQ ID NO: 13349 - DNA, 26 bp, Homo sapiens
cgggcggcgggggctaggggccgggc

SEQ ID NO: 13350 - DNA, 26 bp, Homo sapiens
gggcggcgggggctaggggccgggcc

SEQ ID NO: 13351 - DNA, 26 bp, Homo sapiens
ggcggcgggggctaggggccgggccg

SEQ ID NO: 13352 - DNA, 26 bp, Homo sapiens
gcggcgggggctaggggccgggccgg

SEQ ID NO: 13353 - DNA, 26 bp, Homo sapiens
cggcgggggctaggggccgggccggg

SEQ ID NO: 13354 - DNA, 26 bp, Homo sapiens
ggcgggggctaggggccgggccgggg

SEQ ID NO: 13355 - DNA, 26 bp, Homo sapiens
gcgggggctaggggccgggccggggc

SEQ ID NO: 13356 - DNA, 26 bp, Homo sapiens
cgggggctaggggccgggccggggcc

SEQ ID NO: 13357 - DNA, 26 bp, Homo sapiens
gggggctaggggccgggccggggccg

SEQ ID NO: 13358 - DNA, 26 bp, Homo sapiens
ggggctaggggccgggccggggccgc

SEQ ID NO: 13359 - DNA, 26 bp, Homo sapiens
gggctaggggccgggccggggccgcg

SEQ ID NO: 13360 - DNA, 26 bp, Homo sapiens
ggctaggggccgggccggggccgcgg

SEQ ID NO: 13361 - DNA, 26 bp, Homo sapiens
gctaggggccgggccggggccgcggg

SEQ ID NO: 13362 - DNA, 26 bp, Homo sapiens
ctaggggccgggccggggccgcgggc

SEQ ID NO: 13363 - DNA, 26 bp, Homo sapiens
taggggccgggccggggccgcgggcg

SEQ ID NO: 13364 - DNA, 26 bp, Homo sapiens
aggggccgggccggggccgcgggcgg

SEQ ID NO: 13365 - DNA, 26 bp, Homo sapiens
ggggccgggccggggccgcgggcggg

SEQ ID NO: 13366 - DNA, 26 bp, Homo sapiens
gggccgggccggggccgcgggcgggc

SEQ ID NO: 13367 - DNA, 26 bp, Homo sapiens
ggccgggccggggccgcgggcgggcg

SEQ ID NO: 13368 - DNA, 26 bp, Homo sapiens
gccgggccggggccgcgggcgggcgc

SEQ ID NO: 13369 - DNA, 26 bp, Homo sapiens
ccgggccggggccgcgggcgggcgct

SEQ ID NO: 13370 - DNA, 26 bp, Homo sapiens
cgggccggggccgcgggcgggcgctc

SEQ ID NO: 13371 - DNA, 26 bp, Homo sapiens
gggccggggccgcgggcgggcgctcg

SEQ ID NO: 13372 - DNA, 26 bp, Homo sapiens
ggccggggccgcgggcgggcgctcgg

SEQ ID NO: 13373 - DNA, 26 bp, Homo sapiens
gccggggccgcgggcgggcgctcgga

SEQ ID NO: 13374 - DNA, 26 bp, Homo sapiens
ccggggccgcgggcgggcgctcggag

SEQ ID NO: 13375 - DNA, 26 bp, Homo sapiens
cggggccgcgggcgggcgctcggagc

SEQ ID NO: 13376 - DNA, 26 bp, Homo sapiens
ggggccgcgggcgggcgctcggagcc

SEQ ID NO: 13377 - DNA, 26 bp, Homo sapiens
gggccgcgggcgggcgctcggagcct

SEQ ID NO: 13378 - DNA, 26 bp, Homo sapiens
ggccgcgggcgggcgctcggagcctg

SEQ ID NO: 13379 - DNA, 26 bp, Homo sapiens
gccgcgggcgggcgctcggagcctgg

SEQ ID NO: 13380 - DNA, 26 bp, Homo sapiens
ccgcgggcgggcgctcggagcctggg

SEQ ID NO: 13381 - DNA, 26 bp, Homo sapiens
cgcgggcgggcgctcggagcctgggg

SEQ ID NO: 13382 - DNA, 26 bp, Homo sapiens
gcgggcgggcgctcggagcctggggg

SEQ ID NO: 13383 - DNA, 26 bp, Homo sapiens
cgggcgggcgctcggagcctgggggc

SEQ ID NO: 13384 - DNA, 26 bp, Homo sapiens
gggcgggcgctcggagcctgggggcc

SEQ ID NO: 13385 - DNA, 26 bp, Homo sapiens
ggcgggcgctcggagcctgggggccg

SEQ ID NO: 13386 - DNA, 26 bp, Homo sapiens
gcgggcgctcggagcctgggggccgc

SEQ ID NO: 13387 - DNA, 26 bp, Homo sapiens
cgggcgctcggagcctgggggccgcc

SEQ ID NO: 13388 - DNA, 26 bp, Homo sapiens
gggcgctcggagcctgggggccgccg

SEQ ID NO: 13389 - DNA, 26 bp, Homo sapiens
ggcgctcggagcctgggggccgccgg

SEQ ID NO: 13390 - DNA, 26 bp, Homo sapiens
gcgctcggagcctgggggccgccgga

SEQ ID NO: 13391 - DNA, 26 bp, Homo sapiens
cgctcggagcctgggggccgccggag

SEQ ID NO: 13392 - DNA, 26 bp, Homo sapiens
gctcggagcctgggggccgccggagc

SEQ ID NO: 13393 - DNA, 26 bp, Homo sapiens
ctcggagcctgggggccgccggagcc

SEQ ID NO: 13394 - DNA, 26 bp, Homo sapiens
tcggagcctgggggccgccggagccc

SEQ ID NO: 13395 - DNA, 26 bp, Homo sapiens
cggagcctgggggccgccggagcccg

SEQ ID NO: 13396 - DNA, 26 bp, Homo sapiens
ggagcctgggggccgccggagcccgc

SEQ ID NO: 13397 - DNA, 26 bp, Homo sapiens
gagcctgggggccgccggagcccgca

SEQ ID NO: 13398 - DNA, 26 bp, Homo sapiens
agcctgggggccgccggagcccgcac

SEQ ID NO: 13399 - DNA, 26 bp, Homo sapiens
gcctgggggccgccggagcccgcact

SEQ ID NO: 13400 - DNA, 26 bp, Homo sapiens
cctgggggccgccggagcccgcactg

SEQ ID NO: 13401 - DNA, 26 bp, Homo sapiens
ctgggggccgccggagcccgcactga

SEQ ID NO: 13402 - DNA, 26 bp, Homo sapiens
tgggggccgccggagcccgcactgac

SEQ ID NO: 13403 - DNA, 26 bp, Homo sapiens
gggggccgccggagcccgcactgacc

SEQ ID NO: 13404 - DNA, 26 bp, Homo sapiens
ggggccgccggagcccgcactgacct

SEQ ID NO: 13405 - DNA, 26 bp, Homo sapiens
gggccgccggagcccgcactgacctc

SEQ ID NO: 13406 - DNA, 26 bp, Homo sapiens
ggccgccggagcccgcactgacctcc

SEQ ID NO: 13407 - DNA, 26 bp, Homo sapiens
gccgccggagcccgcactgacctccc

SEQ ID NO: 13408 - DNA, 26 bp, Homo sapiens
ccgccggagcccgcactgacctcccg

SEQ ID NO: 13409 - DNA, 26 bp, Homo sapiens
cgccggagcccgcactgacctcccgc

SEQ ID NO: 13410 - DNA, 26 bp, Homo sapiens
gccggagcccgcactgacctcccgct

SEQ ID NO: 13411 - DNA, 26 bp, Homo sapiens
ccggagcccgcactgacctcccgctt

SEQ ID NO: 13412 - DNA, 26 bp, Homo sapiens
cggagcccgcactgacctcccgcttc

SEQ ID NO: 13413 - DNA, 26 bp, Homo sapiens
ggagcccgcactgacctcccgcttcc

SEQ ID NO: 13414 - DNA, 26 bp, Homo sapiens
gagcccgcactgacctcccgcttccc

SEQ ID NO: 13415 - DNA, 26 bp, Homo sapiens
agcccgcactgacctcccgcttcccc

SEQ ID NO: 13416 - DNA, 26 bp, Homo sapiens
gcccgcactgacctcccgcttccccg

SEQ ID NO: 13417 - DNA, 26 bp, Homo sapiens
cccgcactgacctcccgcttccccgg

SEQ ID NO: 13418 - DNA, 26 bp, Homo sapiens
ccgcactgacctcccgcttccccggc

SEQ ID NO: 13419 - DNA, 26 bp, Homo sapiens
cgcactgacctcccgcttccccggcg

SEQ ID NO: 13420 - DNA, 26 bp, Homo sapiens
gcactgacctcccgcttccccggcga

SEQ ID NO: 13421 - DNA, 26 bp, Homo sapiens
cactgacctcccgcttccccggcgac

SEQ ID NO: 13422 - DNA, 26 bp, Homo sapiens
actgacctcccgcttccccggcgact

SEQ ID NO: 13423 - DNA, 26 bp, Homo sapiens
ctgacctcccgcttccccggcgactg

SEQ ID NO: 13424 - DNA, 26 bp, Homo sapiens
tgacctcccgcttccccggcgactgg

SEQ ID NO: 13425 - DNA, 26 bp, Homo sapiens
gacctcccgcttccccggcgactggg

SEQ ID NO: 13426 - DNA, 26 bp, Homo sapiens
acctcccgcttccccggcgactgggg

SEQ ID NO: 13427 - DNA, 26 bp, Homo sapiens
cctcccgcttccccggcgactggggc

SEQ ID NO: 13428 - DNA, 26 bp, Homo sapiens
ctcccgcttccccggcgactggggct

SEQ ID NO: 13429 - DNA, 26 bp, Homo sapiens
tcccgcttccccggcgactggggctg

SEQ ID NO: 13430 - DNA, 26 bp, Homo sapiens
cccgcttccccggcgactggggctgc

SEQ ID NO: 13431 - DNA, 26 bp, Homo sapiens
ccgcttccccggcgactggggctgct

SEQ ID NO: 13432 - DNA, 26 bp, Homo sapiens
cgcttccccggcgactggggctgctc

SEQ ID NO: 13433 - DNA, 26 bp, Homo sapiens
gcttccccggcgactggggctgctct

SEQ ID NO: 13434 - DNA, 26 bp, Homo sapiens
cttccccggcgactggggctgctctt

SEQ ID NO: 13435 - DNA, 26 bp, Homo sapiens
ttccccggcgactggggctgctcttt

SEQ ID NO: 13436 - DNA, 26 bp, Homo sapiens
tccccggcgactggggctgctctttc

SEQ ID NO: 13437 - DNA, 26 bp, Homo sapiens
ccccggcgactggggctgctctttcc

SEQ ID NO: 13438 - DNA, 26 bp, Homo sapiens
cccggcgactggggctgctctttccg

SEQ ID NO: 13439 - DNA, 26 bp, Homo sapiens
ccggcgactggggctgctctttccga

SEQ ID NO: 13440 - DNA, 26 bp, Homo sapiens
cggcgactggggctgctctttccgac

SEQ ID NO: 13441 - DNA, 26 bp, Homo sapiens
ggcgactggggctgctctttccgact

SEQ ID NO: 13442 - DNA, 26 bp, Homo sapiens
gcgactggggctgctctttccgactc

SEQ ID NO: 13443 - DNA, 26 bp, Homo sapiens
cgactggggctgctctttccgactcc

SEQ ID NO: 13444 - DNA, 26 bp, Homo sapiens
gactggggctgctctttccgactcca

SEQ ID NO: 13445 - DNA, 26 bp, Homo sapiens
actggggctgctctttccgactccaa

SEQ ID NO: 13446 - DNA, 26 bp, Homo sapiens
ctggggctgctctttccgactccaac

SEQ ID NO: 13447 - DNA, 26 bp, Homo sapiens
tggggctgctctttccgactccaact

SEQ ID NO: 13448 - DNA, 26 bp, Homo sapiens
ggggctgctctttccgactccaactc

SEQ ID NO: 13449 - DNA, 26 bp, Homo sapiens
gggctgctctttccgactccaactct

SEQ ID NO: 13450 - DNA, 26 bp, Homo sapiens
ggctgctctttccgactccaactctc

SEQ ID NO: 13451 - DNA, 26 bp, Homo sapiens
gctgctctttccgactccaactctct

SEQ ID NO: 13452 - DNA, 26 bp, Homo sapiens
ctgctctttccgactccaactctctt

SEQ ID NO: 13453 - DNA, 26 bp, Homo sapiens
tgctctttccgactccaactctctta

SEQ ID NO: 13454 - DNA, 26 bp, Homo sapiens
gctctttccgactccaactctcttat

SEQ ID NO: 13455 - DNA, 26 bp, Homo sapiens
ctctttccgactccaactctcttatt

SEQ ID NO: 13456 - DNA, 26 bp, Homo sapiens
tctttccgactccaactctcttatta

SEQ ID NO: 13457 - DNA, 26 bp, Homo sapiens
ctttccgactccaactctcttattac

SEQ ID NO: 13458 - DNA, 26 bp, Homo sapiens
tttccgactccaactctcttattacg

SEQ ID NO: 13459 - DNA, 26 bp, Homo sapiens
ttccgactccaactctcttattacgc

SEQ ID NO: 13460 - DNA, 26 bp, Homo sapiens
tccgactccaactctcttattacgcg

SEQ ID NO: 13461 - DNA, 26 bp, Homo sapiens
ccgactccaactctcttattacgcgc

SEQ ID NO: 13462 - DNA, 26 bp, Homo sapiens
cgactccaactctcttattacgcgct

SEQ ID NO: 13463 - DNA, 26 bp, Homo sapiens
gactccaactctcttattacgcgctc

SEQ ID NO: 13464 - DNA, 26 bp, Homo sapiens
actccaactctcttattacgcgctcc

SEQ ID NO: 13465 - DNA, 26 bp, Homo sapiens
ctccaactctcttattacgcgctcca

SEQ ID NO: 13466 - DNA, 26 bp, Homo sapiens
tccaactctcttattacgcgctccat

SEQ ID NO: 13467 - DNA, 26 bp, Homo sapiens
ccaactctcttattacgcgctccatg

SEQ ID NO: 13468 - DNA, 26 bp, Homo sapiens
caactctcttattacgcgctccatgc

SEQ ID NO: 13469 - DNA, 26 bp, Homo sapiens
aactctcttattacgcgctccatgcc

SEQ ID NO: 13470 - DNA, 26 bp, Homo sapiens
actctcttattacgcgctccatgccg

SEQ ID NO: 13471 - DNA, 26 bp, Homo sapiens
ctctcttattacgcgctccatgccgc

SEQ ID NO: 13472 - DNA, 26 bp, Homo sapiens
tctcttattacgcgctccatgccgct

SEQ ID NO: 13473 - DNA, 26 bp, Homo sapiens
ctcttattacgcgctccatgccgctc

SEQ ID NO: 13474 - DNA, 26 bp, Homo sapiens
tcttattacgcgctccatgccgctcg

SEQ ID NO: 13475 - DNA, 26 bp, Homo sapiens
cttattacgcgctccatgccgctcgc

SEQ ID NO: 13476 - DNA, 26 bp, Homo sapiens
ttattacgcgctccatgccgctcgcc

SEQ ID NO: 13477 - DNA, 26 bp, Homo sapiens
tattacgcgctccatgccgctcgcct

SEQ ID NO: 13478 - DNA, 26 bp, Homo sapiens
attacgcgctccatgccgctcgcctt

SEQ ID NO: 13479 - DNA, 26 bp, Homo sapiens
ttacgcgctccatgccgctcgccttt

SEQ ID NO: 13480 - DNA, 26 bp, Homo sapiens
tacgcgctccatgccgctcgcctttc

SEQ ID NO: 13481 - DNA, 26 bp, Homo sapiens
acgcgctccatgccgctcgcctttcc

SEQ ID NO: 13482 - DNA, 26 bp, Homo sapiens
cgcgctccatgccgctcgcctttcca

SEQ ID NO: 13483 - DNA, 26 bp, Homo sapiens
gcgctccatgccgctcgcctttccac

SEQ ID NO: 13484 - DNA, 26 bp, Homo sapiens
cgctccatgccgctcgcctttccacc

SEQ ID NO: 13485 - DNA, 26 bp, Homo sapiens
gctccatgccgctcgcctttccacct

SEQ ID NO: 13486 - DNA, 26 bp, Homo sapiens
ctccatgccgctcgcctttccacctg

SEQ ID NO: 13487 - DNA, 26 bp, Homo sapiens
tccatgccgctcgcctttccacctgc

SEQ ID NO: 13488 - DNA, 26 bp, Homo sapiens
ccatgccgctcgcctttccacctgcc

SEQ ID NO: 13489 - DNA, 26 bp, Homo sapiens
catgccgctcgcctttccacctgcca

SEQ ID NO: 13490 - DNA, 26 bp, Homo sapiens
atgccgctcgcctttccacctgccac

SEQ ID NO: 13491 - DNA, 26 bp, Homo sapiens
tgccgctcgcctttccacctgccacc

SEQ ID NO: 13492 - DNA, 26 bp, Homo sapiens
gccgctcgcctttccacctgccaccg

SEQ ID NO: 13493 - DNA, 26 bp, Homo sapiens
ccgctcgcctttccacctgccaccgg

SEQ ID NO: 13494 - DNA, 26 bp, Homo sapiens
cgctcgcctttccacctgccaccggc

SEQ ID NO: 13495 - DNA, 26 bp, Homo sapiens
gctcgcctttccacctgccaccggcg

SEQ ID NO: 13496 - DNA, 26 bp, Homo sapiens
ctcgcctttccacctgccaccggcgc

SEQ ID NO: 13497 - DNA, 26 bp, Homo sapiens
tcgcctttccacctgccaccggcgcg

SEQ ID NO: 13498 - DNA, 26 bp, Homo sapiens
cgcctttccacctgccaccggcgcgc

SEQ ID NO: 13499 - DNA, 26 bp, Homo sapiens
gcctttccacctgccaccggcgcgcg

SEQ ID NO: 13500 - DNA, 26 bp, Homo sapiens
cctttccacctgccaccggcgcgcgc

SEQ ID NO: 13501 - DNA, 26 bp, Homo sapiens
ctttccacctgccaccggcgcgcgcc

SEQ ID NO: 13502 - DNA, 26 bp, Homo sapiens
tttccacctgccaccggcgcgcgccg

SEQ ID NO: 13503 - DNA, 26 bp, Homo sapiens
ttccacctgccaccggcgcgcgccgc

SEQ ID NO: 13504 - DNA, 26 bp, Homo sapiens
tccacctgccaccggcgcgcgccgct

SEQ ID NO: 13505 - DNA, 26 bp, Homo sapiens
ccacctgccaccggcgcgcgccgctc

SEQ ID NO: 13506 - DNA, 26 bp, Homo sapiens
cacctgccaccggcgcgcgccgctca

SEQ ID NO: 13507 - DNA, 26 bp, Homo sapiens
acctgccaccggcgcgcgccgctcac

SEQ ID NO: 13508 - DNA, 26 bp, Homo sapiens
cctgccaccggcgcgcgccgctcaca

SEQ ID NO: 13509 - DNA, 26 bp, Homo sapiens
ctgccaccggcgcgcgccgctcacat

SEQ ID NO: 13510 - DNA, 26 bp, Homo sapiens
tgccaccggcgcgcgccgctcacatg

SEQ ID NO: 13511 - DNA, 26 bp, Homo sapiens
gccaccggcgcgcgccgctcacatgt

SEQ ID NO: 13512 - DNA, 26 bp, Homo sapiens
ccaccggcgcgcgccgctcacatgtc

SEQ ID NO: 13513 - DNA, 26 bp, Homo sapiens
agcatctggaaactcggtgtgttctg

SEQ ID NO: 13514 - DNA, 26 bp, Homo sapiens
gcatctggaaactcggtgtgttctga

SEQ ID NO: 13515 - DNA, 26 bp, Homo sapiens
catctggaaactcggtgtgttctgat

SEQ ID NO: 13516 - DNA, 26 bp, Homo sapiens
atctggaaactcggtgtgttctgatg

SEQ ID NO: 13517 - DNA, 26 bp, Homo sapiens
tctggaaactcggtgtgttctgatgt

SEQ ID NO: 13518 - DNA, 26 bp, Homo sapiens
ctggaaactcggtgtgttctgatgtc

SEQ ID NO: 13519 - DNA, 26 bp, Homo sapiens
tggaaactcggtgtgttctgatgtct

SEQ ID NO: 13520 - DNA, 26 bp, Homo sapiens
ggaaactcggtgtgttctgatgtctg

SEQ ID NO: 13521 - DNA, 26 bp, Homo sapiens
gaaactcggtgtgttctgatgtctgc

SEQ ID NO: 13522 - DNA, 26 bp, Homo sapiens
aaactcggtgtgttctgatgtctgct

SEQ ID NO: 13523 - DNA, 26 bp, Homo sapiens
aactcggtgtgttctgatgtctgctg

SEQ ID NO: 13524 - DNA, 26 bp, Homo sapiens
actcggtgtgttctgatgtctgctgg

SEQ ID NO: 13525 - DNA, 26 bp, Homo sapiens
ctcggtgtgttctgatgtctgctggc

SEQ ID NO: 13526 - DNA, 26 bp, Homo sapiens
tcggtgtgttctgatgtctgctggcg

SEQ ID NO: 13527 - DNA, 26 bp, Homo sapiens
cggtgtgttctgatgtctgctggcga

SEQ ID NO: 13528 - DNA, 26 bp, Homo sapiens
ggtgtgttctgatgtctgctggcgaa

SEQ ID NO: 13529 - DNA, 26 bp, Homo sapiens
gtgtgttctgatgtctgctggcgaat

SEQ ID NO: 13530 - DNA, 26 bp, Homo sapiens
tgtgttctgatgtctgctggcgaata

SEQ ID NO: 13531 - DNA, 26 bp, Homo sapiens
gtgttctgatgtctgctggcgaatag

SEQ ID NO: 13532 - DNA, 26 bp, Homo sapiens
tgttctgatgtctgctggcgaatagc

SEQ ID NO: 13533 - DNA, 26 bp, Homo sapiens
gttctgatgtctgctggcgaatagcg

SEQ ID NO: 13534 - DNA, 26 bp, Homo sapiens
ttctgatgtctgctggcgaatagcga

SEQ ID NO: 13535 - DNA, 26 bp, Homo sapiens
tctgatgtctgctggcgaatagcgaa

SEQ ID NO: 13536 - DNA, 26 bp, Homo sapiens
ctgatgtctgctggcgaatagcgaat

SEQ ID NO: 13537 - DNA, 26 bp, Homo sapiens
tgatgtctgctggcgaatagcgaatt

SEQ ID NO: 13538 - DNA, 26 bp, Homo sapiens
gatgtctgctggcgaatagcgaattg

SEQ ID NO: 13539 - DNA, 26 bp, Homo sapiens
atgtctgctggcgaatagcgaattga

SEQ ID NO: 13540 - DNA, 26 bp, Homo sapiens
tgtctgctggcgaatagcgaattgac

SEQ ID NO: 13541 - DNA, 26 bp, Homo sapiens
gtctgctggcgaatagcgaattgaca

SEQ ID NO: 13542 - DNA, 26 bp, Homo sapiens
tctgctggcgaatagcgaattgacac

SEQ ID NO: 13543 - DNA, 26 bp, Homo sapiens
ctgctggcgaatagcgaattgacacc

SEQ ID NO: 13544 - DNA, 26 bp, Homo sapiens
tgctggcgaatagcgaattgacacca

SEQ ID NO: 13545 - DNA, 26 bp, Homo sapiens
gctggcgaatagcgaattgacaccag

SEQ ID NO: 13546 - DNA, 26 bp, Homo sapiens
ctggcgaatagcgaattgacaccaga

SEQ ID NO: 13547 - DNA, 26 bp, Homo sapiens
tggcgaatagcgaattgacaccagag

SEQ ID NO: 13548 - DNA, 26 bp, Homo sapiens
ggcgaatagcgaattgacaccagagc

SEQ ID NO: 13549 - DNA, 26 bp, Homo sapiens
gcgaatagcgaattgacaccagagca

SEQ ID NO: 13550 - DNA, 26 bp, Homo sapiens
cgaatagcgaattgacaccagagcaa

SEQ ID NO: 13551 - DNA, 26 bp, Homo sapiens
gaatagcgaattgacaccagagcaag

SEQ ID NO: 13552 - DNA, 26 bp, Homo sapiens
aatagcgaattgacaccagagcaagt

SEQ ID NO: 13553 - DNA, 26 bp, Homo sapiens
atagcgaattgacaccagagcaagtt

SEQ ID NO: 13554 - DNA, 26 bp, Homo sapiens
tagcgaattgacaccagagcaagtta

SEQ ID NO: 13555 - DNA, 26 bp, Homo sapiens
agcgaattgacaccagagcaagttat

SEQ ID NO: 13556 - DNA, 26 bp, Homo sapiens
gcgaattgacaccagagcaagttatt

SEQ ID NO: 13557 - DNA, 26 bp, Homo sapiens
cgaattgacaccagagcaagttattt

SEQ ID NO: 13558 - DNA, 26 bp, Homo sapiens
gaattgacaccagagcaagttatttc

SEQ ID NO: 13559 - DNA, 26 bp, Homo sapiens
aattgacaccagagcaagttatttct

SEQ ID NO: 13560 - DNA, 26 bp, Homo sapiens
attgacaccagagcaagttatttctc

SEQ ID NO: 13561 - DNA, 26 bp, Homo sapiens
ttgacaccagagcaagttatttctca

SEQ ID NO: 13562 - DNA, 26 bp, Homo sapiens
tgacaccagagcaagttatttctcag

SEQ ID NO: 13563 - DNA, 26 bp, Homo sapiens
gacaccagagcaagttatttctcagg

SEQ ID NO: 13564 - DNA, 26 bp, Homo sapiens
acaccagagcaagttatttctcaggt

SEQ ID NO: 13565 - DNA, 26 bp, Homo sapiens
caccagagcaagttatttctcaggta

SEQ ID NO: 13566 - DNA, 26 bp, Homo sapiens
accagagcaagttatttctcaggtat

SEQ ID NO: 13567 - DNA, 26 bp, Homo sapiens
ccagagcaagttatttctcaggtata

SEQ ID NO: 13568 - DNA, 26 bp, Homo sapiens
cagagcaagttatttctcaggtatac

SEQ ID NO: 13569 - DNA, 26 bp, Homo sapiens
agagcaagttatttctcaggtatacg

SEQ ID NO: 13570 - DNA, 26 bp, Homo sapiens
gagcaagttatttctcaggtatacgg

SEQ ID NO: 13571 - DNA, 26 bp, Homo sapiens
agcaagttatttctcaggtatacggt

SEQ ID NO: 13572 - DNA, 26 bp, Homo sapiens
gcaagttatttctcaggtatacggtt

SEQ ID NO: 13573 - DNA, 26 bp, Homo sapiens
caagttatttctcaggtatacggttg

SEQ ID NO: 13574 - DNA, 26 bp, Homo sapiens
aagttatttctcaggtatacggttgt

SEQ ID NO: 13575 - DNA, 26 bp, Homo sapiens
agttatttctcaggtatacggttgtt

SEQ ID NO: 13576 - DNA, 26 bp, Homo sapiens
gttatttctcaggtatacggttgttt

SEQ ID NO: 13577 - DNA, 26 bp, Homo sapiens
ttatttctcaggtatacggttgtttc

SEQ ID NO: 13578 - DNA, 26 bp, Homo sapiens
tatttctcaggtatacggttgtttca

SEQ ID NO: 13579 - DNA, 26 bp, Homo sapiens
atttctcaggtatacggttgtttcat

SEQ ID NO: 13580 - DNA, 26 bp, Homo sapiens
tttctcaggtatacggttgtttcatc

SEQ ID NO: 13581 - DNA, 26 bp, Homo sapiens
ttctcaggtatacggttgtttcatcc

SEQ ID NO: 13582 - DNA, 26 bp, Homo sapiens
tctcaggtatacggttgtttcatcct

SEQ ID NO: 13583 - DNA, 26 bp, Homo sapiens
ctcaggtatacggttgtttcatcctt

SEQ ID NO: 13584 - DNA, 26 bp, Homo sapiens
tcaggtatacggttgtttcatccttg

SEQ ID NO: 13585 - DNA, 26 bp, Homo sapiens
caggtatacggttgtttcatccttgt

SEQ ID NO: 13586 - DNA, 26 bp, Homo sapiens
aggtatacggttgtttcatccttgta

SEQ ID NO: 13587 - DNA, 26 bp, Homo sapiens
ggtatacggttgtttcatccttgtaa

SEQ ID NO: 13588 - DNA, 26 bp, Homo sapiens
gtatacggttgtttcatccttgtaaa

SEQ ID NO: 13589 - DNA, 26 bp, Homo sapiens
tatacggttgtttcatccttgtaaat

SEQ ID NO: 13590 - DNA, 26 bp, Homo sapiens
atacggttgtttcatccttgtaaata

SEQ ID NO: 13591 - DNA, 26 bp, Homo sapiens
tacggttgtttcatccttgtaaatag

SEQ ID NO: 13592 - DNA, 26 bp, Homo sapiens
acggttgtttcatccttgtaaatagt

SEQ ID NO: 13593 - DNA, 26 bp, Homo sapiens
cggttgtttcatccttgtaaatagtt

SEQ ID NO: 13594 - DNA, 26 bp, Homo sapiens
ggttgtttcatccttgtaaatagttc

SEQ ID NO: 13595 - DNA, 26 bp, Homo sapiens
gttgtttcatccttgtaaatagttcc

SEQ ID NO: 13596 - DNA, 26 bp, Homo sapiens
ttgtttcatccttgtaaatagttcca

SEQ ID NO: 13597 - DNA, 26 bp, Homo sapiens
tgtttcatccttgtaaatagttccaa

SEQ ID NO: 13598 - DNA, 26 bp, Homo sapiens
gtttcatccttgtaaatagttccaaa

SEQ ID NO: 13599 - DNA, 26 bp, Homo sapiens
tttcatccttgtaaatagttccaaag

SEQ ID NO: 13600 - DNA, 26 bp, Homo sapiens
ttcatccttgtaaatagttccaaagg

SEQ ID NO: 13601 - DNA, 26 bp, Homo sapiens
tcatccttgtaaatagttccaaaggg

SEQ ID NO: 13602 - DNA, 26 bp, Homo sapiens
catccttgtaaatagttccaaaggga

SEQ ID NO: 13603 - DNA, 26 bp, Homo sapiens
atccttgtaaatagttccaaagggaa

SEQ ID NO: 13604 - DNA, 26 bp, Homo sapiens
tccttgtaaatagttccaaagggaaa

SEQ ID NO: 13605 - DNA, 26 bp, Homo sapiens
ccttgtaaatagttccaaagggaaac

SEQ ID NO: 13606 - DNA, 26 bp, Homo sapiens
cttgtaaatagttccaaagggaaaca

SEQ ID NO: 13607 - DNA, 26 bp, Homo sapiens
ttgtaaatagttccaaagggaaacag

SEQ ID NO: 13608 - DNA, 26 bp, Homo sapiens
tgtaaatagttccaaagggaaacagt

SEQ ID NO: 13609 - DNA, 26 bp, Homo sapiens
gtaaatagttccaaagggaaacagtg

SEQ ID NO: 13610 - DNA, 26 bp, Homo sapiens
taaatagttccaaagggaaacagtgt

SEQ ID NO: 13611 - DNA, 26 bp, Homo sapiens
aaatagttccaaagggaaacagtgtt

SEQ ID NO: 13612 - DNA, 26 bp, Homo sapiens
aatagttccaaagggaaacagtgttt

SEQ ID NO: 13613 - DNA, 26 bp, Homo sapiens
atagttccaaagggaaacagtgtttt

SEQ ID NO: 13614 - DNA, 26 bp, Homo sapiens
tagttccaaagggaaacagtgtttta

SEQ ID NO: 13615 - DNA, 26 bp, Homo sapiens
agttccaaagggaaacagtgttttat

SEQ ID NO: 13616 - DNA, 26 bp, Homo sapiens
gttccaaagggaaacagtgttttatt

SEQ ID NO: 13617 - DNA, 26 bp, Homo sapiens
ttccaaagggaaacagtgttttattt

SEQ ID NO: 13618 - DNA, 26 bp, Homo sapiens
tccaaagggaaacagtgttttatttt

SEQ ID NO: 13619 - DNA, 26 bp, Homo sapiens
ccaaagggaaacagtgttttatttta

SEQ ID NO: 13620 - DNA, 26 bp, Homo sapiens
caaagggaaacagtgttttattttaa

SEQ ID NO: 13621 - DNA, 26 bp, Homo sapiens
aaagggaaacagtgttttattttaag

SEQ ID NO: 13622 - DNA, 26 bp, Homo sapiens
aagggaaacagtgttttattttaagg

SEQ ID NO: 13623 - DNA, 26 bp, Homo sapiens
agggaaacagtgttttattttaagga

SEQ ID NO: 13624 - DNA, 26 bp, Homo sapiens
gggaaacagtgttttattttaaggag

SEQ ID NO: 13625 - DNA, 26 bp, Homo sapiens
ggaaacagtgttttattttaaggagt

SEQ ID NO: 13626 - DNA, 26 bp, Homo sapiens
gaaacagtgttttattttaaggagta

SEQ ID NO: 13627 - DNA, 26 bp, Homo sapiens
aaacagtgttttattttaaggagtac

SEQ ID NO: 13628 - DNA, 26 bp, Homo sapiens
aacagtgttttattttaaggagtact

SEQ ID NO: 13629 - DNA, 26 bp, Homo sapiens
acagtgttttattttaaggagtactt

SEQ ID NO: 13630 - DNA, 26 bp, Homo sapiens
cagtgttttattttaaggagtacttt

SEQ ID NO: 13631 - DNA, 26 bp, Homo sapiens
agtgttttattttaaggagtactttc

SEQ ID NO: 13632 - DNA, 26 bp, Homo sapiens
gtgttttattttaaggagtactttca

SEQ ID NO: 13633 - DNA, 26 bp, Homo sapiens
tgttttattttaaggagtactttcaa

SEQ ID NO: 13634 - DNA, 26 bp, Homo sapiens
gttttattttaaggagtactttcaaa

SEQ ID NO: 13635 - DNA, 26 bp, Homo sapiens
ttttattttaaggagtactttcaaac

SEQ ID NO: 13636 - DNA, 26 bp, Homo sapiens
tttattttaaggagtactttcaaacc

SEQ ID NO: 13637 - DNA, 26 bp, Homo sapiens
ttattttaaggagtactttcaaacct

SEQ ID NO: 13638 - DNA, 26 bp, Homo sapiens
tattttaaggagtactttcaaaccta

SEQ ID NO: 13639 - DNA, 26 bp, Homo sapiens
attttaaggagtactttcaaacctat

SEQ ID NO: 13640 - DNA, 26 bp, Homo sapiens
ttttaaggagtactttcaaacctatt

SEQ ID NO: 13641 - DNA, 26 bp, Homo sapiens
tttaaggagtactttcaaacctatta

SEQ ID NO: 13642 - DNA, 26 bp, Homo sapiens
ttaaggagtactttcaaacctattat

SEQ ID NO: 13643 - DNA, 26 bp, Homo sapiens
taaggagtactttcaaacctattata

SEQ ID NO: 13644 - DNA, 26 bp, Homo sapiens
aaggagtactttcaaacctattatat

SEQ ID NO: 13645 - DNA, 26 bp, Homo sapiens
aggagtactttcaaacctattatatg

SEQ ID NO: 13646 - DNA, 26 bp, Homo sapiens
ggagtactttcaaacctattatatga

SEQ ID NO: 13647 - DNA, 26 bp, Homo sapiens
gagtactttcaaacctattatatgag

SEQ ID NO: 13648 - DNA, 26 bp, Homo sapiens
agtactttcaaacctattatatgagg

SEQ ID NO: 13649 - DNA, 26 bp, Homo sapiens
gtactttcaaacctattatatgaggg

SEQ ID NO: 13650 - DNA, 26 bp, Homo sapiens
tactttcaaacctattatatgagggc

SEQ ID NO: 13651 - DNA, 26 bp, Homo sapiens
actttcaaacctattatatgagggct

SEQ ID NO: 13652 - DNA, 26 bp, Homo sapiens
ctttcaaacctattatatgagggctg

SEQ ID NO: 13653 - DNA, 26 bp, Homo sapiens
tttcaaacctattatatgagggctgc

SEQ ID NO: 13654 - DNA, 26 bp, Homo sapiens
ttcaaacctattatatgagggctgct

SEQ ID NO: 13655 - DNA, 26 bp, Homo sapiens
tcaaacctattatatgagggctgctg

SEQ ID NO: 13656 - DNA, 26 bp, Homo sapiens
caaacctattatatgagggctgctga

SEQ ID NO: 13657 - DNA, 26 bp, Homo sapiens
aaacctattatatgagggctgctgag

SEQ ID NO: 13658 - DNA, 26 bp, Homo sapiens
aacctattatatgagggctgctgagt

SEQ ID NO: 13659 - DNA, 26 bp, Homo sapiens
acctattatatgagggctgctgagta

SEQ ID NO: 13660 - DNA, 26 bp, Homo sapiens
cctattatatgagggctgctgagtac

SEQ ID NO: 13661 - DNA, 26 bp, Homo sapiens
ctattatatgagggctgctgagtact

SEQ ID NO: 13662 - DNA, 26 bp, Homo sapiens
tattatatgagggctgctgagtactc

SEQ ID NO: 13663 - DNA, 26 bp, Homo sapiens
attatatgagggctgctgagtactca

SEQ ID NO: 13664 - DNA, 26 bp, Homo sapiens
ttatatgagggctgctgagtactcag

SEQ ID NO: 13665 - DNA, 26 bp, Homo sapiens
tatatgagggctgctgagtactcagc

SEQ ID NO: 13666 - DNA, 26 bp, Homo sapiens
atatgagggctgctgagtactcagca

SEQ ID NO: 13667 - DNA, 26 bp, Homo sapiens
tatgagggctgctgagtactcagcac

SEQ ID NO: 13668 - DNA, 26 bp, Homo sapiens
atgagggctgctgagtactcagcacc

SEQ ID NO: 13669 - DNA, 26 bp, Homo sapiens
tgagggctgctgagtactcagcacct

SEQ ID NO: 13670 - DNA, 26 bp, Homo sapiens
gagggctgctgagtactcagcacctg

SEQ ID NO: 13671 - DNA, 26 bp, Homo sapiens
agggctgctgagtactcagcacctgt

SEQ ID NO: 13672 - DNA, 26 bp, Homo sapiens
gggctgctgagtactcagcacctgtg

SEQ ID NO: 13673 - DNA, 26 bp, Homo sapiens
ggctgctgagtactcagcacctgtgg

SEQ ID NO: 13674 - DNA, 26 bp, Homo sapiens
gctgctgagtactcagcacctgtggt

SEQ ID NO: 13675 - DNA, 26 bp, Homo sapiens
ctgctgagtactcagcacctgtggtc

SEQ ID NO: 13676 - DNA, 26 bp, Homo sapiens
tgctgagtactcagcacctgtggtca

SEQ ID NO: 13677 - DNA, 26 bp, Homo sapiens
gctgagtactcagcacctgtggtcag

SEQ ID NO: 13678 - DNA, 26 bp, Homo sapiens
ctgagtactcagcacctgtggtcaga

SEQ ID NO: 13679 - DNA, 26 bp, Homo sapiens
tgagtactcagcacctgtggtcagag

SEQ ID NO: 13680 - DNA, 26 bp, Homo sapiens
gagtactcagcacctgtggtcagagg

SEQ ID NO: 13681 - DNA, 26 bp, Homo sapiens
agtactcagcacctgtggtcagaggc

SEQ ID NO: 13682 - DNA, 26 bp, Homo sapiens
gtactcagcacctgtggtcagaggcc

SEQ ID NO: 13683 - DNA, 26 bp, Homo sapiens
tactcagcacctgtggtcagaggcct

SEQ ID NO: 13684 - DNA, 26 bp, Homo sapiens
actcagcacctgtggtcagaggccta

SEQ ID NO: 13685 - DNA, 26 bp, Homo sapiens
ctcagcacctgtggtcagaggcctag

SEQ ID NO: 13686 - DNA, 26 bp, Homo sapiens
tcagcacctgtggtcagaggcctagt

SEQ ID NO: 13687 - DNA, 26 bp, Homo sapiens
cagcacctgtggtcagaggcctagtg

SEQ ID NO: 13688 - DNA, 26 bp, Homo sapiens
agcacctgtggtcagaggcctagtga

SEQ ID NO: 13689 - DNA, 26 bp, Homo sapiens
gcacctgtggtcagaggcctagtgat

SEQ ID NO: 13690 - DNA, 26 bp, Homo sapiens
cacctgtggtcagaggcctagtgatc

SEQ ID NO: 13691 - DNA, 26 bp, Homo sapiens
acctgtggtcagaggcctagtgatct

SEQ ID NO: 13692 - DNA, 26 bp, Homo sapiens
cctgtggtcagaggcctagtgatctg

SEQ ID NO: 13693 - DNA, 26 bp, Homo sapiens
ctgtggtcagaggcctagtgatctgt

SEQ ID NO: 13694 - DNA, 26 bp, Homo sapiens
tgtggtcagaggcctagtgatctgtt

SEQ ID NO: 13695 - DNA, 26 bp, Homo sapiens
gtggtcagaggcctagtgatctgttt

SEQ ID NO: 13696 - DNA, 26 bp, Homo sapiens
tggtcagaggcctagtgatctgtttg

SEQ ID NO: 13697 - DNA, 26 bp, Homo sapiens
ggtcagaggcctagtgatctgtttgc

SEQ ID NO: 13698 - DNA, 26 bp, Homo sapiens
gtcagaggcctagtgatctgtttgct

SEQ ID NO: 13699 - DNA, 26 bp, Homo sapiens
tcagaggcctagtgatctgtttgctg

SEQ ID NO: 13700 - DNA, 26 bp, Homo sapiens
cagaggcctagtgatctgtttgctgt

SEQ ID NO: 13701 - DNA, 26 bp, Homo sapiens
agaggcctagtgatctgtttgctgtc

SEQ ID NO: 13702 - DNA, 26 bp, Homo sapiens
gaggcctagtgatctgtttgctgtca

SEQ ID NO: 13703 - DNA, 26 bp, Homo sapiens
aggcctagtgatctgtttgctgtcat

SEQ ID NO: 13704 - DNA, 26 bp, Homo sapiens
ggcctagtgatctgtttgctgtcatt

SEQ ID NO: 13705 - DNA, 26 bp, Homo sapiens
gcctagtgatctgtttgctgtcattc

SEQ ID NO: 13706 - DNA, 26 bp, Homo sapiens
cctagtgatctgtttgctgtcattct

SEQ ID NO: 13707 - DNA, 26 bp, Homo sapiens
ctagtgatctgtttgctgtcattctc

SEQ ID NO: 13708 - DNA, 26 bp, Homo sapiens
tagtgatctgtttgctgtcattctct

SEQ ID NO: 13709 - DNA, 26 bp, Homo sapiens
agtgatctgtttgctgtcattctctg

SEQ ID NO: 13710 - DNA, 26 bp, Homo sapiens
gtgatctgtttgctgtcattctctgc

SEQ ID NO: 13711 - DNA, 26 bp, Homo sapiens
tgatctgtttgctgtcattctctgct

SEQ ID NO: 13712 - DNA, 26 bp, Homo sapiens
gatctgtttgctgtcattctctgctt

SEQ ID NO: 13713 - DNA, 26 bp, Homo sapiens
atctgtttgctgtcattctctgcttt

SEQ ID NO: 13714 - DNA, 26 bp, Homo sapiens
tctgtttgctgtcattctctgctttt

SEQ ID NO: 13715 - DNA, 26 bp, Homo sapiens
ctgtttgctgtcattctctgcttttt

SEQ ID NO: 13716 - DNA, 26 bp, Homo sapiens
tgtttgctgtcattctctgctttttc

SEQ ID NO: 13717 - DNA, 26 bp, Homo sapiens
gtttgctgtcattctctgctttttcc

SEQ ID NO: 13718 - DNA, 26 bp, Homo sapiens
tttgctgtcattctctgctttttcct

SEQ ID NO: 13719 - DNA, 26 bp, Homo sapiens
ttgctgtcattctctgctttttcctt

SEQ ID NO: 13720 - DNA, 26 bp, Homo sapiens
tgctgtcattctctgctttttccttg

SEQ ID NO: 13721 - DNA, 26 bp, Homo sapiens
gctgtcattctctgctttttccttgg

SEQ ID NO: 13722 - DNA, 26 bp, Homo sapiens
ctgtcattctctgctttttccttggt

SEQ ID NO: 13723 - DNA, 26 bp, Homo sapiens
tgtcattctctgctttttccttggtg

SEQ ID NO: 13724 - DNA, 26 bp, Homo sapiens
gtcattctctgctttttccttggtgc

SEQ ID NO: 13725 - DNA, 26 bp, Homo sapiens
tcattctctgctttttccttggtgct

SEQ ID NO: 13726 - DNA, 26 bp, Homo sapiens
cattctctgctttttccttggtgctt

SEQ ID NO: 13727 - DNA, 26 bp, Homo sapiens
attctctgctttttccttggtgcttt

SEQ ID NO: 13728 - DNA, 26 bp, Homo sapiens
ttctctgctttttccttggtgctttc

SEQ ID NO: 13729 - DNA, 26 bp, Homo sapiens
tctctgctttttccttggtgctttct

SEQ ID NO: 13730 - DNA, 26 bp, Homo sapiens
ctctgctttttccttggtgctttctg

SEQ ID NO: 13731 - DNA, 26 bp, Homo sapiens
tctgctttttccttggtgctttctgg

SEQ ID NO: 13732 - DNA, 26 bp, Homo sapiens
ctgctttttccttggtgctttctgga

SEQ ID NO: 13733 - DNA, 26 bp, Homo sapiens
tgctttttccttggtgctttctggag

SEQ ID NO: 13734 - DNA, 26 bp, Homo sapiens
gctttttccttggtgctttctggagg

SEQ ID NO: 13735 - DNA, 26 bp, Homo sapiens
ctttttccttggtgctttctggagga

SEQ ID NO: 13736 - DNA, 26 bp, Homo sapiens
tttttccttggtgctttctggaggac

SEQ ID NO: 13737 - DNA, 26 bp, Homo sapiens
ttttccttggtgctttctggaggaca

SEQ ID NO: 13738 - DNA, 26 bp, Homo sapiens
tttccttggtgctttctggaggacag

SEQ ID NO: 13739 - DNA, 26 bp, Homo sapiens
ttccttggtgctttctggaggacagc

SEQ ID NO: 13740 - DNA, 26 bp, Homo sapiens
tccttggtgctttctggaggacagca

SEQ ID NO: 13741 - DNA, 26 bp, Homo sapiens
ccttggtgctttctggaggacagcag

SEQ ID NO: 13742 - DNA, 26 bp, Homo sapiens
cttggtgctttctggaggacagcagg

SEQ ID NO: 13743 - DNA, 26 bp, Homo sapiens
ttggtgctttctggaggacagcaggt

SEQ ID NO: 13744 - DNA, 26 bp, Homo sapiens
tggtgctttctggaggacagcaggtt

SEQ ID NO: 13745 - DNA, 26 bp, Homo sapiens
ggtgctttctggaggacagcaggttg

SEQ ID NO: 13746 - DNA, 26 bp, Homo sapiens
gtgctttctggaggacagcaggttga

SEQ ID NO: 13747 - DNA, 26 bp, Homo sapiens
tgctttctggaggacagcaggttgag

SEQ ID NO: 13748 - DNA, 26 bp, Homo sapiens
gctttctggaggacagcaggttgagg

SEQ ID NO: 13749 - DNA, 26 bp, Homo sapiens
ctttctggaggacagcaggttgagga

SEQ ID NO: 13750 - DNA, 26 bp, Homo sapiens
tttctggaggacagcaggttgaggat

SEQ ID NO: 13751 - DNA, 26 bp, Homo sapiens
ttctggaggacagcaggttgaggatg

SEQ ID NO: 13752 - DNA, 26 bp, Homo sapiens
tctggaggacagcaggttgaggatga

SEQ ID NO: 13753 - DNA, 26 bp, Homo sapiens
ctggaggacagcaggttgaggatgaa

SEQ ID NO: 13754 - DNA, 26 bp, Homo sapiens
tggaggacagcaggttgaggatgaag

SEQ ID NO: 13755 - DNA, 26 bp, Homo sapiens
ggaggacagcaggttgaggatgaagg

SEQ ID NO: 13756 - DNA, 26 bp, Homo sapiens
gaggacagcaggttgaggatgaagga

SEQ ID NO: 13757 - DNA, 26 bp, Homo sapiens
aggacagcaggttgaggatgaaggaa

SEQ ID NO: 13758 - DNA, 26 bp, Homo sapiens
ggacagcaggttgaggatgaaggaag

SEQ ID NO: 13759 - DNA, 26 bp, Homo sapiens
gacagcaggttgaggatgaaggaagg

SEQ ID NO: 13760 - DNA, 26 bp, Homo sapiens
acagcaggttgaggatgaaggaaggg

SEQ ID NO: 13761 - DNA, 26 bp, Homo sapiens
cagcaggttgaggatgaaggaagggt

SEQ ID NO: 13762 - DNA, 26 bp, Homo sapiens
agcaggttgaggatgaaggaagggtc

SEQ ID NO: 13763 - DNA, 26 bp, Homo sapiens
gcaggttgaggatgaaggaagggtca

SEQ ID NO: 13764 - DNA, 26 bp, Homo sapiens
caggttgaggatgaaggaagggtcag

SEQ ID NO: 13765 - DNA, 26 bp, Homo sapiens
aggttgaggatgaaggaagggtcagt

SEQ ID NO: 13766 - DNA, 26 bp, Homo sapiens
ggttgaggatgaaggaagggtcagtt

SEQ ID NO: 13767 - DNA, 26 bp, Homo sapiens
gttgaggatgaaggaagggtcagttc

SEQ ID NO: 13768 - DNA, 26 bp, Homo sapiens
ttgaggatgaaggaagggtcagttcc

SEQ ID NO: 13769 - DNA, 26 bp, Homo sapiens
tgaggatgaaggaagggtcagttcca

SEQ ID NO: 13770 - DNA, 26 bp, Homo sapiens
gaggatgaaggaagggtcagttccag

SEQ ID NO: 13771 - DNA, 26 bp, Homo sapiens
aggatgaaggaagggtcagttccagg

SEQ ID NO: 13772 - DNA, 26 bp, Homo sapiens
ggatgaaggaagggtcagttccaggc

SEQ ID NO: 13773 - DNA, 26 bp, Homo sapiens
gatgaaggaagggtcagttccaggct

SEQ ID NO: 13774 - DNA, 26 bp, Homo sapiens
atgaaggaagggtcagttccaggctc

SEQ ID NO: 13775 - DNA, 26 bp, Homo sapiens
tgaaggaagggtcagttccaggctca

SEQ ID NO: 13776 - DNA, 26 bp, Homo sapiens
gaaggaagggtcagttccaggctcag

SEQ ID NO: 13777 - DNA, 26 bp, Homo sapiens
aaggaagggtcagttccaggctcagc

SEQ ID NO: 13778 - DNA, 26 bp, Homo sapiens
aggaagggtcagttccaggctcagct

SEQ ID NO: 13779 - DNA, 26 bp, Homo sapiens
ggaagggtcagttccaggctcagctg

SEQ ID NO: 13780 - DNA, 26 bp, Homo sapiens
gaagggtcagttccaggctcagctgt

SEQ ID NO: 13781 - DNA, 26 bp, Homo sapiens
aagggtcagttccaggctcagctgtg

SEQ ID NO: 13782 - DNA, 26 bp, Homo sapiens
agggtcagttccaggctcagctgtgg

SEQ ID NO: 13783 - DNA, 26 bp, Homo sapiens
gggtcagttccaggctcagctgtggc

SEQ ID NO: 13784 - DNA, 26 bp, Homo sapiens
ggtcagttccaggctcagctgtggcc

SEQ ID NO: 13785 - DNA, 26 bp, Homo sapiens
gtcagttccaggctcagctgtggcct

SEQ ID NO: 13786 - DNA, 26 bp, Homo sapiens
tcagttccaggctcagctgtggcctt

SEQ ID NO: 13787 - DNA, 26 bp, Homo sapiens
cagttccaggctcagctgtggccttt

SEQ ID NO: 13788 - DNA, 26 bp, Homo sapiens
agttccaggctcagctgtggccttta

SEQ ID NO: 13789 - DNA, 26 bp, Homo sapiens
gttccaggctcagctgtggcctttag

SEQ ID NO: 13790 - DNA, 26 bp, Homo sapiens
ttccaggctcagctgtggcctttagt

SEQ ID NO: 13791 - DNA, 26 bp, Homo sapiens
tccaggctcagctgtggcctttagtc

SEQ ID NO: 13792 - DNA, 26 bp, Homo sapiens
ccaggctcagctgtggcctttagtca

SEQ ID NO: 13793 - DNA, 26 bp, Homo sapiens
caggctcagctgtggcctttagtcag

SEQ ID NO: 13794 - DNA, 26 bp, Homo sapiens
aggctcagctgtggcctttagtcagc

SEQ ID NO: 13795 - DNA, 26 bp, Homo sapiens
ggctcagctgtggcctttagtcagct

SEQ ID NO: 13796 - DNA, 26 bp, Homo sapiens
gctcagctgtggcctttagtcagctg

SEQ ID NO: 13797 - DNA, 26 bp, Homo sapiens
ctcagctgtggcctttagtcagctgc

SEQ ID NO: 13798 - DNA, 26 bp, Homo sapiens
tcagctgtggcctttagtcagctgca

SEQ ID NO: 13799 - DNA, 26 bp, Homo sapiens
cagctgtggcctttagtcagctgcag

SEQ ID NO: 13800 - DNA, 26 bp, Homo sapiens
agctgtggcctttagtcagctgcaga

SEQ ID NO: 13801 - DNA, 26 bp, Homo sapiens
gctgtggcctttagtcagctgcagat

SEQ ID NO: 13802 - DNA, 26 bp, Homo sapiens
ctgtggcctttagtcagctgcagatc

SEQ ID NO: 13803 - DNA, 26 bp, Homo sapiens
tgtggcctttagtcagctgcagatca

SEQ ID NO: 13804 - DNA, 26 bp, Homo sapiens
gtggcctttagtcagctgcagatcaa

SEQ ID NO: 13805 - DNA, 26 bp, Homo sapiens
tggcctttagtcagctgcagatcaat

SEQ ID NO: 13806 - DNA, 26 bp, Homo sapiens
ggcctttagtcagctgcagatcaatt

SEQ ID NO: 13807 - DNA, 26 bp, Homo sapiens
gcctttagtcagctgcagatcaattt

SEQ ID NO: 13808 - DNA, 26 bp, Homo sapiens
cctttagtcagctgcagatcaatttg

SEQ ID NO: 13809 - DNA, 26 bp, Homo sapiens
ctttagtcagctgcagatcaatttga

SEQ ID NO: 13810 - DNA, 26 bp, Homo sapiens
tttagtcagctgcagatcaatttgat

SEQ ID NO: 13811 - DNA, 26 bp, Homo sapiens
ttagtcagctgcagatcaatttgatg

SEQ ID NO: 13812 - DNA, 26 bp, Homo sapiens
tagtcagctgcagatcaatttgatgg

SEQ ID NO: 13813 - DNA, 26 bp, Homo sapiens
agtcagctgcagatcaatttgatggg

SEQ ID NO: 13814 - DNA, 26 bp, Homo sapiens
gtcagctgcagatcaatttgatgggt

SEQ ID NO: 13815 - DNA, 26 bp, Homo sapiens
tcagctgcagatcaatttgatgggta

SEQ ID NO: 13816 - DNA, 26 bp, Homo sapiens
cagctgcagatcaatttgatgggtaa

SEQ ID NO: 13817 - DNA, 26 bp, Homo sapiens
agctgcagatcaatttgatgggtaat

SEQ ID NO: 13818 - DNA, 26 bp, Homo sapiens
gctgcagatcaatttgatgggtaatt

SEQ ID NO: 13819 - DNA, 26 bp, Homo sapiens
ctgcagatcaatttgatgggtaattc

SEQ ID NO: 13820 - DNA, 26 bp, Homo sapiens
tgcagatcaatttgatgggtaattca

SEQ ID NO: 13821 - DNA, 26 bp, Homo sapiens
gcagatcaatttgatgggtaattcag

SEQ ID NO: 13822 - DNA, 26 bp, Homo sapiens
cagatcaatttgatgggtaattcagg

SEQ ID NO: 13823 - DNA, 26 bp, Homo sapiens
agatcaatttgatgggtaattcaggg

SEQ ID NO: 13824 - DNA, 26 bp, Homo sapiens
gatcaatttgatgggtaattcagggg

SEQ ID NO: 13825 - DNA, 26 bp, Homo sapiens
atcaatttgatgggtaattcagggga

SEQ ID NO: 13826 - DNA, 26 bp, Homo sapiens
tcaatttgatgggtaattcaggggaa

SEQ ID NO: 13827 - DNA, 26 bp, Homo sapiens
caatttgatgggtaattcaggggaaa

SEQ ID NO: 13828 - DNA, 26 bp, Homo sapiens
aatttgatgggtaattcaggggaaaa

SEQ ID NO: 13829 - DNA, 26 bp, Homo sapiens
atttgatgggtaattcaggggaaaaa

SEQ ID NO: 13830 - DNA, 26 bp, Homo sapiens
tttgatgggtaattcaggggaaaaaa

SEQ ID NO: 13831 - DNA, 26 bp, Homo sapiens
ttgatgggtaattcaggggaaaaaaa

SEQ ID NO: 13832 - DNA, 26 bp, Homo sapiens
tgatgggtaattcaggggaaaaaaaa

SEQ ID NO: 13833 - DNA, 26 bp, Homo sapiens
gatgggtaattcaggggaaaaaaaaa

SEQ ID NO: 13834 - DNA, 26 bp, Homo sapiens
atgggtaattcaggggaaaaaaaaag

SEQ ID NO: 13835 - DNA, 26 bp, Homo sapiens
tgggtaattcaggggaaaaaaaaagt

SEQ ID NO: 13836 - DNA, 26 bp, Homo sapiens
gggtaattcaggggaaaaaaaaagtt

SEQ ID NO: 13837 - DNA, 26 bp, Homo sapiens
ggtaattcaggggaaaaaaaaagttg

SEQ ID NO: 13838 - DNA, 26 bp, Homo sapiens
gtaattcaggggaaaaaaaaagttga

SEQ ID NO: 13839 - DNA, 26 bp, Homo sapiens
taattcaggggaaaaaaaaagttgac

SEQ ID NO: 13840 - DNA, 26 bp, Homo sapiens
aattcaggggaaaaaaaaagttgacc

SEQ ID NO: 13841 - DNA, 26 bp, Homo sapiens
attcaggggaaaaaaaaagttgacct

SEQ ID NO: 13842 - DNA, 26 bp, Homo sapiens
ttcaggggaaaaaaaaagttgacctg

SEQ ID NO: 13843 - DNA, 26 bp, Homo sapiens
tcaggggaaaaaaaaagttgacctgg

SEQ ID NO: 13844 - DNA, 26 bp, Homo sapiens
caggggaaaaaaaaagttgacctggg

SEQ ID NO: 13845 - DNA, 26 bp, Homo sapiens
aggggaaaaaaaaagttgacctgggt

SEQ ID NO: 13846 - DNA, 26 bp, Homo sapiens
ggggaaaaaaaaagttgacctgggtc

SEQ ID NO: 13847 - DNA, 26 bp, Homo sapiens
gggaaaaaaaaagttgacctgggtca

SEQ ID NO: 13848 - DNA, 26 bp, Homo sapiens
ggaaaaaaaaagttgacctgggtcat

SEQ ID NO: 13849 - DNA, 26 bp, Homo sapiens
gaaaaaaaaagttgacctgggtcatg

SEQ ID NO: 13850 - DNA, 26 bp, Homo sapiens
aaaaaaaaagttgacctgggtcatgc

SEQ ID NO: 13851 - DNA, 26 bp, Homo sapiens
aaaaaaaagttgacctgggtcatgct

SEQ ID NO: 13852 - DNA, 26 bp, Homo sapiens
aaaaaaagttgacctgggtcatgctt

SEQ ID NO: 13853 - DNA, 26 bp, Homo sapiens
aaaaaagttgacctgggtcatgcttg

SEQ ID NO: 13854 - DNA, 26 bp, Homo sapiens
aaaaagttgacctgggtcatgcttgg

SEQ ID NO: 13855 - DNA, 26 bp, Homo sapiens
aaaagttgacctgggtcatgcttggt

SEQ ID NO: 13856 - DNA, 26 bp, Homo sapiens
aaagttgacctgggtcatgcttggtg

SEQ ID NO: 13857 - DNA, 26 bp, Homo sapiens
aagttgacctgggtcatgcttggtga

SEQ ID NO: 13858 - DNA, 26 bp, Homo sapiens
agttgacctgggtcatgcttggtgac

SEQ ID NO: 13859 - DNA, 26 bp, Homo sapiens
gttgacctgggtcatgcttggtgaca

SEQ ID NO: 13860 - DNA, 26 bp, Homo sapiens
ttgacctgggtcatgcttggtgacag

SEQ ID NO: 13861 - DNA, 26 bp, Homo sapiens
tgacctgggtcatgcttggtgacagc

SEQ ID NO: 13862 - DNA, 26 bp, Homo sapiens
gacctgggtcatgcttggtgacagcc

SEQ ID NO: 13863 - DNA, 26 bp, Homo sapiens
acctgggtcatgcttggtgacagcca

SEQ ID NO: 13864 - DNA, 26 bp, Homo sapiens
cctgggtcatgcttggtgacagccag

SEQ ID NO: 13865 - DNA, 26 bp, Homo sapiens
ctgggtcatgcttggtgacagccaga

SEQ ID NO: 13866 - DNA, 26 bp, Homo sapiens
tgggtcatgcttggtgacagccagaa

SEQ ID NO: 13867 - DNA, 26 bp, Homo sapiens
gggtcatgcttggtgacagccagaac

SEQ ID NO: 13868 - DNA, 26 bp, Homo sapiens
ggtcatgcttggtgacagccagaaca

SEQ ID NO: 13869 - DNA, 26 bp, Homo sapiens
gtcatgcttggtgacagccagaacaa

SEQ ID NO: 13870 - DNA, 26 bp, Homo sapiens
tcatgcttggtgacagccagaacaag

SEQ ID NO: 13871 - DNA, 26 bp, Homo sapiens
catgcttggtgacagccagaacaaga

SEQ ID NO: 13872 - DNA, 26 bp, Homo sapiens
atgcttggtgacagccagaacaagac

SEQ ID NO: 13873 - DNA, 26 bp, Homo sapiens
tgcttggtgacagccagaacaagacc

SEQ ID NO: 13874 - DNA, 26 bp, Homo sapiens
gcttggtgacagccagaacaagacca

SEQ ID NO: 13875 - DNA, 26 bp, Homo sapiens
cttggtgacagccagaacaagaccaa

SEQ ID NO: 13876 - DNA, 26 bp, Homo sapiens
ttggtgacagccagaacaagaccaag

SEQ ID NO: 13877 - DNA, 26 bp, Homo sapiens
tggtgacagccagaacaagaccaaga

SEQ ID NO: 13878 - DNA, 26 bp, Homo sapiens
ggtgacagccagaacaagaccaagat

SEQ ID NO: 13879 - DNA, 26 bp, Homo sapiens
gtgacagccagaacaagaccaagatg

SEQ ID NO: 13880 - DNA, 26 bp, Homo sapiens
tgacagccagaacaagaccaagatga

SEQ ID NO: 13881 - DNA, 26 bp, Homo sapiens
gacagccagaacaagaccaagatgat

SEQ ID NO: 13882 - DNA, 26 bp, Homo sapiens
acagccagaacaagaccaagatgata

SEQ ID NO: 13883 - DNA, 26 bp, Homo sapiens
cagccagaacaagaccaagatgatac

SEQ ID NO: 13884 - DNA, 26 bp, Homo sapiens
agccagaacaagaccaagatgataca

SEQ ID NO: 13885 - DNA, 26 bp, Homo sapiens
gccagaacaagaccaagatgatacag

SEQ ID NO: 13886 - DNA, 26 bp, Homo sapiens
ccagaacaagaccaagatgatacagt

SEQ ID NO: 13887 - DNA, 26 bp, Homo sapiens
cagaacaagaccaagatgatacagtg

SEQ ID NO: 13888 - DNA, 26 bp, Homo sapiens
agaacaagaccaagatgatacagtga

SEQ ID NO: 13889 - DNA, 26 bp, Homo sapiens
gaacaagaccaagatgatacagtgat

SEQ ID NO: 13890 - DNA, 26 bp, Homo sapiens
aacaagaccaagatgatacagtgata

SEQ ID NO: 13891 - DNA, 26 bp, Homo sapiens
acaagaccaagatgatacagtgatac

SEQ ID NO: 13892 - DNA, 26 bp, Homo sapiens
caagaccaagatgatacagtgatacc

SEQ ID NO: 13893 - DNA, 26 bp, Homo sapiens
aagaccaagatgatacagtgataccg

SEQ ID NO: 13894 - DNA, 26 bp, Homo sapiens
agaccaagatgatacagtgataccgt

SEQ ID NO: 13895 - DNA, 26 bp, Homo sapiens
gaccaagatgatacagtgataccgtc

SEQ ID NO: 13896 - DNA, 26 bp, Homo sapiens
accaagatgatacagtgataccgtca

SEQ ID NO: 13897 - DNA, 26 bp, Homo sapiens
ccaagatgatacagtgataccgtcat

SEQ ID NO: 13898 - DNA, 26 bp, Homo sapiens
caagatgatacagtgataccgtcata

SEQ ID NO: 13899 - DNA, 26 bp, Homo sapiens
aagatgatacagtgataccgtcataa

SEQ ID NO: 13900 - DNA, 26 bp, Homo sapiens
agatgatacagtgataccgtcataat

SEQ ID NO: 13901 - DNA, 26 bp, Homo sapiens
gatgatacagtgataccgtcataatc

SEQ ID NO: 13902 - DNA, 26 bp, Homo sapiens
atgatacagtgataccgtcataatcc

SEQ ID NO: 13903 - DNA, 26 bp, Homo sapiens
tgatacagtgataccgtcataatccc

SEQ ID NO: 13904 - DNA, 26 bp, Homo sapiens
gatacagtgataccgtcataatccca

SEQ ID NO: 13905 - DNA, 26 bp, Homo sapiens
atacagtgataccgtcataatcccag

SEQ ID NO: 13906 - DNA, 26 bp, Homo sapiens
tacagtgataccgtcataatcccaga

SEQ ID NO: 13907 - DNA, 26 bp, Homo sapiens
acagtgataccgtcataatcccagat

SEQ ID NO: 13908 - DNA, 26 bp, Homo sapiens
cagtgataccgtcataatcccagatt

SEQ ID NO: 13909 - DNA, 26 bp, Homo sapiens
agtgataccgtcataatcccagattt

SEQ ID NO: 13910 - DNA, 26 bp, Homo sapiens
gtgataccgtcataatcccagattta

SEQ ID NO: 13911 - DNA, 26 bp, Homo sapiens
tgataccgtcataatcccagatttaa

SEQ ID NO: 13912 - DNA, 26 bp, Homo sapiens
gataccgtcataatcccagatttaat

SEQ ID NO: 13913 - DNA, 26 bp, Homo sapiens
ataccgtcataatcccagatttaata

SEQ ID NO: 13914 - DNA, 26 bp, Homo sapiens
taccgtcataatcccagatttaatat

SEQ ID NO: 13915 - DNA, 26 bp, Homo sapiens
accgtcataatcccagatttaatata

SEQ ID NO: 13916 - DNA, 26 bp, Homo sapiens
ccgtcataatcccagatttaatataa

SEQ ID NO: 13917 - DNA, 26 bp, Homo sapiens
cgtcataatcccagatttaatataat

SEQ ID NO: 13918 - DNA, 26 bp, Homo sapiens
gtcataatcccagatttaatataatt

SEQ ID NO: 13919 - DNA, 26 bp, Homo sapiens
tcataatcccagatttaatataattt

SEQ ID NO: 13920 - DNA, 26 bp, Homo sapiens
cataatcccagatttaatataatttt

SEQ ID NO: 13921 - DNA, 26 bp, Homo sapiens
ataatcccagatttaatataattttc

SEQ ID NO: 13922 - DNA, 26 bp, Homo sapiens
taatcccagatttaatataattttca

SEQ ID NO: 13923 - DNA, 26 bp, Homo sapiens
aatcccagatttaatataattttcat

SEQ ID NO: 13924 - DNA, 26 bp, Homo sapiens
atcccagatttaatataattttcata

SEQ ID NO: 13925 - DNA, 26 bp, Homo sapiens
tcccagatttaatataattttcataa

SEQ ID NO: 13926 - DNA, 26 bp, Homo sapiens
cccagatttaatataattttcataat

SEQ ID NO: 13927 - DNA, 26 bp, Homo sapiens
ccagatttaatataattttcataatt

SEQ ID NO: 13928 - DNA, 26 bp, Homo sapiens
cagatttaatataattttcataattg

SEQ ID NO: 13929 - DNA, 26 bp, Homo sapiens
agatttaatataattttcataattgc

SEQ ID NO: 13930 - DNA, 26 bp, Homo sapiens
gatttaatataattttcataattgca

SEQ ID NO: 13931 - DNA, 26 bp, Homo sapiens
atttaatataattttcataattgcat

SEQ ID NO: 13932 - DNA, 26 bp, Homo sapiens
tttaatataattttcataattgcata

SEQ ID NO: 13933 - DNA, 26 bp, Homo sapiens
ttaatataattttcataattgcatat

SEQ ID NO: 13934 - DNA, 26 bp, Homo sapiens
taatataattttcataattgcatatt

SEQ ID NO: 13935 - DNA, 26 bp, Homo sapiens
aatataattttcataattgcatatta

SEQ ID NO: 13936 - DNA, 26 bp, Homo sapiens
atataattttcataattgcatattag

SEQ ID NO: 13937 - DNA, 26 bp, Homo sapiens
tataattttcataattgcatattagt

SEQ ID NO: 13938 - DNA, 26 bp, Homo sapiens
ataattttcataattgcatattagta

SEQ ID NO: 13939 - DNA, 26 bp, Homo sapiens
taattttcataattgcatattagtac

SEQ ID NO: 13940 - DNA, 26 bp, Homo sapiens
aattttcataattgcatattagtact

SEQ ID NO: 13941 - DNA, 26 bp, Homo sapiens
attttcataattgcatattagtactc

SEQ ID NO: 13942 - DNA, 26 bp, Homo sapiens
ttttcataattgcatattagtactcg

SEQ ID NO: 13943 - DNA, 26 bp, Homo sapiens
tttcataattgcatattagtactcga

SEQ ID NO: 13944 - DNA, 26 bp, Homo sapiens
ttcataattgcatattagtactcgag

SEQ ID NO: 13945 - DNA, 26 bp, Homo sapiens
tcataattgcatattagtactcgaga

SEQ ID NO: 13946 - DNA, 26 bp, Homo sapiens
cataattgcatattagtactcgagac

SEQ ID NO: 13947 - DNA, 26 bp, Homo sapiens
ataattgcatattagtactcgagaca

SEQ ID NO: 13948 - DNA, 26 bp, Homo sapiens
taattgcatattagtactcgagacac

SEQ ID NO: 13949 - DNA, 26 bp, Homo sapiens
aattgcatattagtactcgagacact

SEQ ID NO: 13950 - DNA, 26 bp, Homo sapiens
attgcatattagtactcgagacacta

SEQ ID NO: 13951 - DNA, 26 bp, Homo sapiens
ttgcatattagtactcgagacactat

SEQ ID NO: 13952 - DNA, 26 bp, Homo sapiens
tgcatattagtactcgagacactata

SEQ ID NO: 13953 - DNA, 26 bp, Homo sapiens
gcatattagtactcgagacactatag

SEQ ID NO: 13954 - DNA, 26 bp, Homo sapiens
catattagtactcgagacactatagc

SEQ ID NO: 13955 - DNA, 26 bp, Homo sapiens
atattagtactcgagacactatagct

SEQ ID NO: 13956 - DNA, 26 bp, Homo sapiens
tattagtactcgagacactatagcta

SEQ ID NO: 13957 - DNA, 26 bp, Homo sapiens
attagtactcgagacactatagctag

SEQ ID NO: 13958 - DNA, 26 bp, Homo sapiens
ttagtactcgagacactatagctaga

SEQ ID NO: 13959 - DNA, 26 bp, Homo sapiens
tagtactcgagacactatagctagaa

SEQ ID NO: 13960 - DNA, 26 bp, Homo sapiens
agtactcgagacactatagctagaaa

SEQ ID NO: 13961 - DNA, 26 bp, Homo sapiens
gtactcgagacactatagctagaaaa

SEQ ID NO: 13962 - DNA, 26 bp, Homo sapiens
tactcgagacactatagctagaaaaa

SEQ ID NO: 13963 - DNA, 26 bp, Homo sapiens
actcgagacactatagctagaaaaac

SEQ ID NO: 13964 - DNA, 26 bp, Homo sapiens
ctcgagacactatagctagaaaaaca

SEQ ID NO: 13965 - DNA, 26 bp, Homo sapiens
tcgagacactatagctagaaaaacag

SEQ ID NO: 13966 - DNA, 26 bp, Homo sapiens
cgagacactatagctagaaaaacagc

SEQ ID NO: 13967 - DNA, 26 bp, Homo sapiens
gagacactatagctagaaaaacagcc

SEQ ID NO: 13968 - DNA, 26 bp, Homo sapiens
agacactatagctagaaaaacagccc

SEQ ID NO: 13969 - DNA, 26 bp, Homo sapiens
gacactatagctagaaaaacagcccc

SEQ ID NO: 13970 - DNA, 26 bp, Homo sapiens
acactatagctagaaaaacagcccct

SEQ ID NO: 13971 - DNA, 26 bp, Homo sapiens
cactatagctagaaaaacagccccta

SEQ ID NO: 13972 - DNA, 26 bp, Homo sapiens
actatagctagaaaaacagcccctaa

SEQ ID NO: 13973 - DNA, 26 bp, Homo sapiens
ctatagctagaaaaacagcccctaat

SEQ ID NO: 13974 - DNA, 26 bp, Homo sapiens
tatagctagaaaaacagcccctaata

SEQ ID NO: 13975 - DNA, 26 bp, Homo sapiens
atagctagaaaaacagcccctaataa

SEQ ID NO: 13976 - DNA, 26 bp, Homo sapiens
tagctagaaaaacagcccctaataag

SEQ ID NO: 13977 - DNA, 26 bp, Homo sapiens
agctagaaaaacagcccctaataagt

SEQ ID NO: 13978 - DNA, 26 bp, Homo sapiens
gctagaaaaacagcccctaataagtc

SEQ ID NO: 13979 - DNA, 26 bp, Homo sapiens
ctagaaaaacagcccctaataagtca

SEQ ID NO: 13980 - DNA, 26 bp, Homo sapiens
tagaaaaacagcccctaataagtcat

SEQ ID NO: 13981 - DNA, 26 bp, Homo sapiens
agaaaaacagcccctaataagtcatt

SEQ ID NO: 13982 - DNA, 26 bp, Homo sapiens
gaaaaacagcccctaataagtcattt

SEQ ID NO: 13983 - DNA, 26 bp, Homo sapiens
aaaaacagcccctaataagtcatttt

SEQ ID NO: 13984 - DNA, 26 bp, Homo sapiens
aaaacagcccctaataagtcattttg

SEQ ID NO: 13985 - DNA, 26 bp, Homo sapiens
aaacagcccctaataagtcattttgc

SEQ ID NO: 13986 - DNA, 26 bp, Homo sapiens
aacagcccctaataagtcattttgca

SEQ ID NO: 13987 - DNA, 26 bp, Homo sapiens
acagcccctaataagtcattttgcat

SEQ ID NO: 13988 - DNA, 26 bp, Homo sapiens
cagcccctaataagtcattttgcatc

SEQ ID NO: 13989 - DNA, 26 bp, Homo sapiens
agcccctaataagtcattttgcatca

SEQ ID NO: 13990 - DNA, 26 bp, Homo sapiens
gcccctaataagtcattttgcatcaa

SEQ ID NO: 13991 - DNA, 26 bp, Homo sapiens
cccctaataagtcattttgcatcaaa

SEQ ID NO: 13992 - DNA, 26 bp, Homo sapiens
ccctaataagtcattttgcatcaaat

SEQ ID NO: 13993 - DNA, 26 bp, Homo sapiens
cctaataagtcattttgcatcaaatg

SEQ ID NO: 13994 - DNA, 26 bp, Homo sapiens
ctaataagtcattttgcatcaaatgt

SEQ ID NO: 13995 - DNA, 26 bp, Homo sapiens
taataagtcattttgcatcaaatgta

SEQ ID NO: 13996 - DNA, 26 bp, Homo sapiens
aataagtcattttgcatcaaatgtac

SEQ ID NO: 13997 - DNA, 26 bp, Homo sapiens
ataagtcattttgcatcaaatgtact

SEQ ID NO: 13998 - DNA, 26 bp, Homo sapiens
taagtcattttgcatcaaatgtacta

SEQ ID NO: 13999 - DNA, 26 bp, Homo sapiens
aagtcattttgcatcaaatgtactaa

SEQ ID NO: 14000 - DNA, 26 bp, Homo sapiens
agtcattttgcatcaaatgtactaag

SEQ ID NO: 14001 - DNA, 26 bp, Homo sapiens
gtcattttgcatcaaatgtactaagc

SEQ ID NO: 14002 - DNA, 26 bp, Homo sapiens
tcattttgcatcaaatgtactaagca

SEQ ID NO: 14003 - DNA, 26 bp, Homo sapiens
cattttgcatcaaatgtactaagcag

SEQ ID NO: 14004 - DNA, 26 bp, Homo sapiens
attttgcatcaaatgtactaagcaga

SEQ ID NO: 14005 - DNA, 26 bp, Homo sapiens
ttttgcatcaaatgtactaagcagag

SEQ ID NO: 14006 - DNA, 26 bp, Homo sapiens
tttgcatcaaatgtactaagcagaga

SEQ ID NO: 14007 - DNA, 26 bp, Homo sapiens
ttgcatcaaatgtactaagcagagat

SEQ ID NO: 14008 - DNA, 26 bp, Homo sapiens
tgcatcaaatgtactaagcagagatc

SEQ ID NO: 14009 - DNA, 26 bp, Homo sapiens
gcatcaaatgtactaagcagagatca

SEQ ID NO: 14010 - DNA, 26 bp, Homo sapiens
catcaaatgtactaagcagagatcat

SEQ ID NO: 14011 - DNA, 26 bp, Homo sapiens
atcaaatgtactaagcagagatcatt

SEQ ID NO: 14012 - DNA, 26 bp, Homo sapiens
tcaaatgtactaagcagagatcattt

SEQ ID NO: 14013 - DNA, 26 bp, Homo sapiens
caaatgtactaagcagagatcatttt

SEQ ID NO: 14014 - DNA, 26 bp, Homo sapiens
aaatgtactaagcagagatcattttt

SEQ ID NO: 14015 - DNA, 26 bp, Homo sapiens
aatgtactaagcagagatcatttttc

SEQ ID NO: 14016 - DNA, 26 bp, Homo sapiens
atgtactaagcagagatcatttttca

SEQ ID NO: 14017 - DNA, 26 bp, Homo sapiens
tgtactaagcagagatcatttttcat

SEQ ID NO: 14018 - DNA, 26 bp, Homo sapiens
gtactaagcagagatcatttttcatg

SEQ ID NO: 14019 - DNA, 26 bp, Homo sapiens
tactaagcagagatcatttttcatga

SEQ ID NO: 14020 - DNA, 26 bp, Homo sapiens
actaagcagagatcatttttcatgat

SEQ ID NO: 14021 - DNA, 26 bp, Homo sapiens
ctaagcagagatcatttttcatgatt

SEQ ID NO: 14022 - DNA, 26 bp, Homo sapiens
taagcagagatcatttttcatgattc

SEQ ID NO: 14023 - DNA, 26 bp, Homo sapiens
aagcagagatcatttttcatgattcc

SEQ ID NO: 14024 - DNA, 26 bp, Homo sapiens
agcagagatcatttttcatgattcct

SEQ ID NO: 14025 - DNA, 26 bp, Homo sapiens
gcagagatcatttttcatgattcctc

SEQ ID NO: 14026 - DNA, 26 bp, Homo sapiens
cagagatcatttttcatgattcctca

SEQ ID NO: 14027 - DNA, 26 bp, Homo sapiens
agagatcatttttcatgattcctcag

SEQ ID NO: 14028 - DNA, 26 bp, Homo sapiens
gagatcatttttcatgattcctcagt

SEQ ID NO: 14029 - DNA, 26 bp, Homo sapiens
agatcatttttcatgattcctcagtg

SEQ ID NO: 14030 - DNA, 26 bp, Homo sapiens
gatcatttttcatgattcctcagtgg

SEQ ID NO: 14031 - DNA, 26 bp, Homo sapiens
atcatttttcatgattcctcagtggt

SEQ ID NO: 14032 - DNA, 26 bp, Homo sapiens
tcatttttcatgattcctcagtggtc

SEQ ID NO: 14033 - DNA, 26 bp, Homo sapiens
catttttcatgattcctcagtggtcc

SEQ ID NO: 14034 - DNA, 26 bp, Homo sapiens
atttttcatgattcctcagtggtcct

SEQ ID NO: 14035 - DNA, 26 bp, Homo sapiens
tttttcatgattcctcagtggtccta

SEQ ID NO: 14036 - DNA, 26 bp, Homo sapiens
ttttcatgattcctcagtggtcctaa

SEQ ID NO: 14037 - DNA, 26 bp, Homo sapiens
tttcatgattcctcagtggtcctaac

SEQ ID NO: 14038 - DNA, 26 bp, Homo sapiens
ttcatgattcctcagtggtcctaaca

SEQ ID NO: 14039 - DNA, 26 bp, Homo sapiens
tcatgattcctcagtggtcctaacaa

SEQ ID NO: 14040 - DNA, 26 bp, Homo sapiens
catgattcctcagtggtcctaacaat

SEQ ID NO: 14041 - DNA, 26 bp, Homo sapiens
atgattcctcagtggtcctaacaatt

SEQ ID NO: 14042 - DNA, 26 bp, Homo sapiens
tgattcctcagtggtcctaacaatta

SEQ ID NO: 14043 - DNA, 26 bp, Homo sapiens
gattcctcagtggtcctaacaattat

SEQ ID NO: 14044 - DNA, 26 bp, Homo sapiens
attcctcagtggtcctaacaattatg

SEQ ID NO: 14045 - DNA, 26 bp, Homo sapiens
ttcctcagtggtcctaacaattatgt

SEQ ID NO: 14046 - DNA, 26 bp, Homo sapiens
tcctcagtggtcctaacaattatgtt

SEQ ID NO: 14047 - DNA, 26 bp, Homo sapiens
cctcagtggtcctaacaattatgttc

SEQ ID NO: 14048 - DNA, 26 bp, Homo sapiens
ctcagtggtcctaacaattatgttca

SEQ ID NO: 14049 - DNA, 26 bp, Homo sapiens
tcagtggtcctaacaattatgttcat

SEQ ID NO: 14050 - DNA, 26 bp, Homo sapiens
cagtggtcctaacaattatgttcatt

SEQ ID NO: 14051 - DNA, 26 bp, Homo sapiens
agtggtcctaacaattatgttcattg

SEQ ID NO: 14052 - DNA, 26 bp, Homo sapiens
gtggtcctaacaattatgttcattga

SEQ ID NO: 14053 - DNA, 26 bp, Homo sapiens
tggtcctaacaattatgttcattgaa

SEQ ID NO: 14054 - DNA, 26 bp, Homo sapiens
ggtcctaacaattatgttcattgaaa

SEQ ID NO: 14055 - DNA, 26 bp, Homo sapiens
gtcctaacaattatgttcattgaaag

SEQ ID NO: 14056 - DNA, 26 bp, Homo sapiens
tcctaacaattatgttcattgaaagt

SEQ ID NO: 14057 - DNA, 26 bp, Homo sapiens
cctaacaattatgttcattgaaagta

SEQ ID NO: 14058 - DNA, 26 bp, Homo sapiens
ctaacaattatgttcattgaaagtac

SEQ ID NO: 14059 - DNA, 26 bp, Homo sapiens
taacaattatgttcattgaaagtact

SEQ ID NO: 14060 - DNA, 26 bp, Homo sapiens
aacaattatgttcattgaaagtactg

SEQ ID NO: 14061 - DNA, 26 bp, Homo sapiens
acaattatgttcattgaaagtactgt

SEQ ID NO: 14062 - DNA, 26 bp, Homo sapiens
caattatgttcattgaaagtactgtc

SEQ ID NO: 14063 - DNA, 26 bp, Homo sapiens
aattatgttcattgaaagtactgtcg

SEQ ID NO: 14064 - DNA, 26 bp, Homo sapiens
attatgttcattgaaagtactgtcgt

SEQ ID NO: 14065 - DNA, 26 bp, Homo sapiens
ttatgttcattgaaagtactgtcgtg

SEQ ID NO: 14066 - DNA, 26 bp, Homo sapiens
tatgttcattgaaagtactgtcgtga

SEQ ID NO: 14067 - DNA, 26 bp, Homo sapiens
atgttcattgaaagtactgtcgtgaa

SEQ ID NO: 14068 - DNA, 26 bp, Homo sapiens
tgttcattgaaagtactgtcgtgaat

SEQ ID NO: 14069 - DNA, 26 bp, Homo sapiens
gttcattgaaagtactgtcgtgaatg

SEQ ID NO: 14070 - DNA, 26 bp, Homo sapiens
ttcattgaaagtactgtcgtgaatgt

SEQ ID NO: 14071 - DNA, 26 bp, Homo sapiens
tcattgaaagtactgtcgtgaatgta

SEQ ID NO: 14072 - DNA, 26 bp, Homo sapiens
cattgaaagtactgtcgtgaatgtaa

SEQ ID NO: 14073 - DNA, 26 bp, Homo sapiens
attgaaagtactgtcgtgaatgtaat

SEQ ID NO: 14074 - DNA, 26 bp, Homo sapiens
ttgaaagtactgtcgtgaatgtaatt

SEQ ID NO: 14075 - DNA, 26 bp, Homo sapiens
tgaaagtactgtcgtgaatgtaattg

SEQ ID NO: 14076 - DNA, 26 bp, Homo sapiens
gaaagtactgtcgtgaatgtaattgg

SEQ ID NO: 14077 - DNA, 26 bp, Homo sapiens
aaagtactgtcgtgaatgtaattggg

SEQ ID NO: 14078 - DNA, 26 bp, Homo sapiens
aagtactgtcgtgaatgtaattggga

SEQ ID NO: 14079 - DNA, 26 bp, Homo sapiens
agtactgtcgtgaatgtaattgggac

SEQ ID NO: 14080 - DNA, 26 bp, Homo sapiens
gtactgtcgtgaatgtaattgggact

SEQ ID NO: 14081 - DNA, 26 bp, Homo sapiens
tactgtcgtgaatgtaattgggactc

SEQ ID NO: 14082 - DNA, 26 bp, Homo sapiens
actgtcgtgaatgtaattgggactca

SEQ ID NO: 14083 - DNA, 26 bp, Homo sapiens
ctgtcgtgaatgtaattgggactcag

SEQ ID NO: 14084 - DNA, 26 bp, Homo sapiens
tgtcgtgaatgtaattgggactcagg

SEQ ID NO: 14085 - DNA, 26 bp, Homo sapiens
gtcgtgaatgtaattgggactcaggc

SEQ ID NO: 14086 - DNA, 26 bp, Homo sapiens
tcgtgaatgtaattgggactcaggca

SEQ ID NO: 14087 - DNA, 26 bp, Homo sapiens
cgtgaatgtaattgggactcaggcac

SEQ ID NO: 14088 - DNA, 26 bp, Homo sapiens
gtgaatgtaattgggactcaggcacg

SEQ ID NO: 14089 - DNA, 26 bp, Homo sapiens
tgaatgtaattgggactcaggcacgg

SEQ ID NO: 14090 - DNA, 26 bp, Homo sapiens
gaatgtaattgggactcaggcacggg

SEQ ID NO: 14091 - DNA, 26 bp, Homo sapiens
aatgtaattgggactcaggcacggga

SEQ ID NO: 14092 - DNA, 26 bp, Homo sapiens
atgtaattgggactcaggcacgggag

SEQ ID NO: 14093 - DNA, 26 bp, Homo sapiens
tgtaattgggactcaggcacgggagg

SEQ ID NO: 14094 - DNA, 26 bp, Homo sapiens
gtaattgggactcaggcacgggagga

SEQ ID NO: 14095 - DNA, 26 bp, Homo sapiens
taattgggactcaggcacgggaggaa

SEQ ID NO: 14096 - DNA, 26 bp, Homo sapiens
aattgggactcaggcacgggaggaaa

SEQ ID NO: 14097 - DNA, 26 bp, Homo sapiens
attgggactcaggcacgggaggaaaa

SEQ ID NO: 14098 - DNA, 26 bp, Homo sapiens
ttgggactcaggcacgggaggaaaaa

SEQ ID NO: 14099 - DNA, 26 bp, Homo sapiens
tgggactcaggcacgggaggaaaaat

SEQ ID NO: 14100 - DNA, 26 bp, Homo sapiens
gggactcaggcacgggaggaaaaata

SEQ ID NO: 14101 - DNA, 26 bp, Homo sapiens
ggactcaggcacgggaggaaaaatac

SEQ ID NO: 14102 - DNA, 26 bp, Homo sapiens
gactcaggcacgggaggaaaaatacc

SEQ ID NO: 14103 - DNA, 26 bp, Homo sapiens
actcaggcacgggaggaaaaataccc

SEQ ID NO: 14104 - DNA, 26 bp, Homo sapiens
ctcaggcacgggaggaaaaataccct

SEQ ID NO: 14105 - DNA, 26 bp, Homo sapiens
tcaggcacgggaggaaaaatacccta

SEQ ID NO: 14106 - DNA, 26 bp, Homo sapiens
caggcacgggaggaaaaataccctaa

SEQ ID NO: 14107 - DNA, 26 bp, Homo sapiens
aggcacgggaggaaaaataccctaag

SEQ ID NO: 14108 - DNA, 26 bp, Homo sapiens
ggcacgggaggaaaaataccctaagc

SEQ ID NO: 14109 - DNA, 26 bp, Homo sapiens
gcacgggaggaaaaataccctaagct

SEQ ID NO: 14110 - DNA, 26 bp, Homo sapiens
cacgggaggaaaaataccctaagctt

SEQ ID NO: 14111 - DNA, 26 bp, Homo sapiens
acgggaggaaaaataccctaagcttg

SEQ ID NO: 14112 - DNA, 26 bp, Homo sapiens
cgggaggaaaaataccctaagcttgg

SEQ ID NO: 14113 - DNA, 26 bp, Homo sapiens
gggaggaaaaataccctaagcttggt

SEQ ID NO: 14114 - DNA, 26 bp, Homo sapiens
ggaggaaaaataccctaagcttggtt

SEQ ID NO: 14115 - DNA, 26 bp, Homo sapiens
gaggaaaaataccctaagcttggttt

SEQ ID NO: 14116 - DNA, 26 bp, Homo sapiens
aggaaaaataccctaagcttggtttt

SEQ ID NO: 14117 - DNA, 26 bp, Homo sapiens
ggaaaaataccctaagcttggttttt

SEQ ID NO: 14118 - DNA, 26 bp, Homo sapiens
gaaaaataccctaagcttggtttttt

SEQ ID NO: 14119 - DNA, 26 bp, Homo sapiens
aaaaataccctaagcttggttttttc

SEQ ID NO: 14120 - DNA, 26 bp, Homo sapiens
aaaataccctaagcttggttttttct

SEQ ID NO: 14121 - DNA, 26 bp, Homo sapiens
aaataccctaagcttggttttttctt

SEQ ID NO: 14122 - DNA, 26 bp, Homo sapiens
aataccctaagcttggttttttcttc

SEQ ID NO: 14123 - DNA, 26 bp, Homo sapiens
ataccctaagcttggttttttcttct

SEQ ID NO: 14124 - DNA, 26 bp, Homo sapiens
taccctaagcttggttttttcttctt

SEQ ID NO: 14125 - DNA, 26 bp, Homo sapiens
accctaagcttggttttttcttcttt

SEQ ID NO: 14126 - DNA, 26 bp, Homo sapiens
ccctaagcttggttttttcttctttt

SEQ ID NO: 14127 - DNA, 26 bp, Homo sapiens
cctaagcttggttttttcttcttttc

SEQ ID NO: 14128 - DNA, 26 bp, Homo sapiens
ctaagcttggttttttcttcttttct

SEQ ID NO: 14129 - DNA, 26 bp, Homo sapiens
taagcttggttttttcttcttttctt

SEQ ID NO: 14130 - DNA, 26 bp, Homo sapiens
aagcttggttttttcttcttttcttc

SEQ ID NO: 14131 - DNA, 26 bp, Homo sapiens
agcttggttttttcttcttttcttct

SEQ ID NO: 14132 - DNA, 26 bp, Homo sapiens
gcttggttttttcttcttttcttctt

SEQ ID NO: 14133 - DNA, 26 bp, Homo sapiens
cttggttttttcttcttttcttcttt

SEQ ID NO: 14134 - DNA, 26 bp, Homo sapiens
ttggttttttcttcttttcttctttt

SEQ ID NO: 14135 - DNA, 26 bp, Homo sapiens
tggttttttcttcttttcttctttta

SEQ ID NO: 14136 - DNA, 26 bp, Homo sapiens
ggttttttcttcttttcttcttttag

SEQ ID NO: 14137 - DNA, 26 bp, Homo sapiens
gttttttcttcttttcttcttttaga

SEQ ID NO: 14138 - DNA, 26 bp, Homo sapiens
ttttttcttcttttcttcttttagag

SEQ ID NO: 14139 - DNA, 26 bp, Homo sapiens
tttttcttcttttcttcttttagagt

SEQ ID NO: 14140 - DNA, 26 bp, Homo sapiens
ttttcttcttttcttcttttagagtt

SEQ ID NO: 14141 - DNA, 26 bp, Homo sapiens
tttcttcttttcttcttttagagttt

SEQ ID NO: 14142 - DNA, 26 bp, Homo sapiens
ttcttcttttcttcttttagagtttg

SEQ ID NO: 14143 - DNA, 26 bp, Homo sapiens
tcttcttttcttcttttagagtttgc

SEQ ID NO: 14144 - DNA, 26 bp, Homo sapiens
cttcttttcttcttttagagtttgca

SEQ ID NO: 14145 - DNA, 26 bp, Homo sapiens
ttcttttcttcttttagagtttgcag

SEQ ID NO: 14146 - DNA, 26 bp, Homo sapiens
tcttttcttcttttagagtttgcaga

SEQ ID NO: 14147 - DNA, 26 bp, Homo sapiens
cttttcttcttttagagtttgcagat

SEQ ID NO: 14148 - DNA, 26 bp, Homo sapiens
ttttcttcttttagagtttgcagatt

SEQ ID NO: 14149 - DNA, 26 bp, Homo sapiens
tttcttcttttagagtttgcagattt

SEQ ID NO: 14150 - DNA, 26 bp, Homo sapiens
ttcttcttttagagtttgcagatttt

SEQ ID NO: 14151 - DNA, 26 bp, Homo sapiens
tcttcttttagagtttgcagattttg

SEQ ID NO: 14152 - DNA, 26 bp, Homo sapiens
cttcttttagagtttgcagattttga

SEQ ID NO: 14153 - DNA, 26 bp, Homo sapiens
ttcttttagagtttgcagattttgac

SEQ ID NO: 14154 - DNA, 26 bp, Homo sapiens
tcttttagagtttgcagattttgacc

SEQ ID NO: 14155 - DNA, 26 bp, Homo sapiens
cttttagagtttgcagattttgacca

SEQ ID NO: 14156 - DNA, 26 bp, Homo sapiens
ttttagagtttgcagattttgaccaa

SEQ ID NO: 14157 - DNA, 26 bp, Homo sapiens
tttagagtttgcagattttgaccaac

SEQ ID NO: 14158 - DNA, 26 bp, Homo sapiens
ttagagtttgcagattttgaccaaca

SEQ ID NO: 14159 - DNA, 26 bp, Homo sapiens
tagagtttgcagattttgaccaacag

SEQ ID NO: 14160 - DNA, 26 bp, Homo sapiens
agagtttgcagattttgaccaacaga

SEQ ID NO: 14161 - DNA, 26 bp, Homo sapiens
gagtttgcagattttgaccaacagac

SEQ ID NO: 14162 - DNA, 26 bp, Homo sapiens
agtttgcagattttgaccaacagaca

SEQ ID NO: 14163 - DNA, 26 bp, Homo sapiens
gtttgcagattttgaccaacagacat

SEQ ID NO: 14164 - DNA, 26 bp, Homo sapiens
tttgcagattttgaccaacagacatg

SEQ ID NO: 14165 - DNA, 26 bp, Homo sapiens
ttgcagattttgaccaacagacatgg

SEQ ID NO: 14166 - DNA, 26 bp, Homo sapiens
tgcagattttgaccaacagacatggt

SEQ ID NO: 14167 - DNA, 26 bp, Homo sapiens
gcagattttgaccaacagacatggtt

SEQ ID NO: 14168 - DNA, 26 bp, Homo sapiens
cagattttgaccaacagacatggtta

SEQ ID NO: 14169 - DNA, 26 bp, Homo sapiens
agattttgaccaacagacatggttaa

SEQ ID NO: 14170 - DNA, 26 bp, Homo sapiens
gattttgaccaacagacatggttaat

SEQ ID NO: 14171 - DNA, 26 bp, Homo sapiens
attttgaccaacagacatggttaata

SEQ ID NO: 14172 - DNA, 26 bp, Homo sapiens
ttttgaccaacagacatggttaataa

SEQ ID NO: 14173 - DNA, 26 bp, Homo sapiens
tttgaccaacagacatggttaataag

SEQ ID NO: 14174 - DNA, 26 bp, Homo sapiens
ttgaccaacagacatggttaataaga

SEQ ID NO: 14175 - DNA, 26 bp, Homo sapiens
tgaccaacagacatggttaataagac

SEQ ID NO: 14176 - DNA, 26 bp, Homo sapiens
gaccaacagacatggttaataagact

SEQ ID NO: 14177 - DNA, 26 bp, Homo sapiens
accaacagacatggttaataagacta

SEQ ID NO: 14178 - DNA, 26 bp, Homo sapiens
ccaacagacatggttaataagactat

SEQ ID NO: 14179 - DNA, 26 bp, Homo sapiens
caacagacatggttaataagactatg

SEQ ID NO: 14180 - DNA, 26 bp, Homo sapiens
aacagacatggttaataagactatgc

SEQ ID NO: 14181 - DNA, 26 bp, Homo sapiens
acagacatggttaataagactatgct

SEQ ID NO: 14182 - DNA, 26 bp, Homo sapiens
cagacatggttaataagactatgctt

SEQ ID NO: 14183 - DNA, 26 bp, Homo sapiens
agacatggttaataagactatgcttt

SEQ ID NO: 14184 - DNA, 26 bp, Homo sapiens
gacatggttaataagactatgctttt

SEQ ID NO: 14185 - DNA, 26 bp, Homo sapiens
acatggttaataagactatgcttttt

SEQ ID NO: 14186 - DNA, 26 bp, Homo sapiens
catggttaataagactatgctttttt

SEQ ID NO: 14187 - DNA, 26 bp, Homo sapiens
atggttaataagactatgctttttta

SEQ ID NO: 14188 - DNA, 26 bp, Homo sapiens
tggttaataagactatgcttttttaa

SEQ ID NO: 14189 - DNA, 26 bp, Homo sapiens
ggttaataagactatgcttttttaaa

SEQ ID NO: 14190 - DNA, 26 bp, Homo sapiens
gttaataagactatgcttttttaaag

SEQ ID NO: 14191 - DNA, 26 bp, Homo sapiens
ttaataagactatgcttttttaaagc

SEQ ID NO: 14192 - DNA, 26 bp, Homo sapiens
taataagactatgcttttttaaagcc

SEQ ID NO: 14193 - DNA, 26 bp, Homo sapiens
aataagactatgcttttttaaagcct

SEQ ID NO: 14194 - DNA, 26 bp, Homo sapiens
ataagactatgcttttttaaagccta

SEQ ID NO: 14195 - DNA, 26 bp, Homo sapiens
taagactatgcttttttaaagcctat

SEQ ID NO: 14196 - DNA, 26 bp, Homo sapiens
aagactatgcttttttaaagcctata

SEQ ID NO: 14197 - DNA, 26 bp, Homo sapiens
agactatgcttttttaaagcctatat

SEQ ID NO: 14198 - DNA, 26 bp, Homo sapiens
gactatgcttttttaaagcctatatt

SEQ ID NO: 14199 - DNA, 26 bp, Homo sapiens
actatgcttttttaaagcctatattt

SEQ ID NO: 14200 - DNA, 26 bp, Homo sapiens
ctatgcttttttaaagcctatatttt

SEQ ID NO: 14201 - DNA, 26 bp, Homo sapiens
tatgcttttttaaagcctatatttta

SEQ ID NO: 14202 - DNA, 26 bp, Homo sapiens
atgcttttttaaagcctatattttat

SEQ ID NO: 14203 - DNA, 26 bp, Homo sapiens
tgcttttttaaagcctatattttata

SEQ ID NO: 14204 - DNA, 26 bp, Homo sapiens
gcttttttaaagcctatattttatat

SEQ ID NO: 14205 - DNA, 26 bp, Homo sapiens
cttttttaaagcctatattttatatt

SEQ ID NO: 14206 - DNA, 26 bp, Homo sapiens
ttttttaaagcctatattttatattt

SEQ ID NO: 14207 - DNA, 26 bp, Homo sapiens
tttttaaagcctatattttatattta

SEQ ID NO: 14208 - DNA, 26 bp, Homo sapiens
ttttaaagcctatattttatatttat

SEQ ID NO: 14209 - DNA, 26 bp, Homo sapiens
tttaaagcctatattttatatttatt

SEQ ID NO: 14210 - DNA, 26 bp, Homo sapiens
ttaaagcctatattttatatttattt

SEQ ID NO: 14211 - DNA, 26 bp, Homo sapiens
taaagcctatattttatatttatttt

SEQ ID NO: 14212 - DNA, 26 bp, Homo sapiens
aaagcctatattttatatttatttta

SEQ ID NO: 14213 - DNA, 26 bp, Homo sapiens
aagcctatattttatatttattttat

SEQ ID NO: 14214 - DNA, 26 bp, Homo sapiens
agcctatattttatatttattttatt

SEQ ID NO: 14215 - DNA, 26 bp, Homo sapiens
gcctatattttatatttattttattt

SEQ ID NO: 14216 - DNA, 26 bp, Homo sapiens
cctatattttatatttattttatttt

SEQ ID NO: 14217 - DNA, 26 bp, Homo sapiens
ctatattttatatttattttattttt

SEQ ID NO: 14218 - DNA, 26 bp, Homo sapiens
tatattttatatttattttatttttt

SEQ ID NO: 14219 - DNA, 26 bp, Homo sapiens
atattttatatttattttatttttta

SEQ ID NO: 14220 - DNA, 26 bp, Homo sapiens
tattttatatttattttattttttaa

SEQ ID NO: 14221 - DNA, 26 bp, Homo sapiens
attttatatttattttattttttaat

SEQ ID NO: 14222 - DNA, 26 bp, Homo sapiens
ttttatatttattttattttttaatt

SEQ ID NO: 14223 - DNA, 26 bp, Homo sapiens
tttatatttattttattttttaattt

SEQ ID NO: 14224 - DNA, 26 bp, Homo sapiens
ttatatttattttattttttaatttt

SEQ ID NO: 14225 - DNA, 26 bp, Homo sapiens
tatatttattttattttttaattttg

SEQ ID NO: 14226 - DNA, 26 bp, Homo sapiens
atatttattttattttttaattttgt

SEQ ID NO: 14227 - DNA, 26 bp, Homo sapiens
tatttattttattttttaattttgtt

SEQ ID NO: 14228 - DNA, 26 bp, Homo sapiens
atttattttattttttaattttgtta

SEQ ID NO: 14229 - DNA, 26 bp, Homo sapiens
tttattttattttttaattttgttag

SEQ ID NO: 14230 - DNA, 26 bp, Homo sapiens
ttattttattttttaattttgttagt

SEQ ID NO: 14231 - DNA, 26 bp, Homo sapiens
tattttattttttaattttgttagtg

SEQ ID NO: 14232 - DNA, 26 bp, Homo sapiens
attttattttttaattttgttagtga

SEQ ID NO: 14233 - DNA, 26 bp, Homo sapiens
ttttattttttaattttgttagtgac

SEQ ID NO: 14234 - DNA, 26 bp, Homo sapiens
tttattttttaattttgttagtgaca

SEQ ID NO: 14235 - DNA, 26 bp, Homo sapiens
ttattttttaattttgttagtgacag

SEQ ID NO: 14236 - DNA, 26 bp, Homo sapiens
tattttttaattttgttagtgacagg

SEQ ID NO: 14237 - DNA, 26 bp, Homo sapiens
attttttaattttgttagtgacaggg

SEQ ID NO: 14238 - DNA, 26 bp, Homo sapiens
ttttttaattttgttagtgacagggt

SEQ ID NO: 14239 - DNA, 26 bp, Homo sapiens
tttttaattttgttagtgacagggtc

SEQ ID NO: 14240 - DNA, 26 bp, Homo sapiens
ttttaattttgttagtgacagggtct

SEQ ID NO: 14241 - DNA, 26 bp, Homo sapiens
tttaattttgttagtgacagggtctc

SEQ ID NO: 14242 - DNA, 26 bp, Homo sapiens
ttaattttgttagtgacagggtctca

SEQ ID NO: 14243 - DNA, 26 bp, Homo sapiens
taattttgttagtgacagggtctcac

SEQ ID NO: 14244 - DNA, 26 bp, Homo sapiens
aattttgttagtgacagggtctcact

SEQ ID NO: 14245 - DNA, 26 bp, Homo sapiens
attttgttagtgacagggtctcactt

SEQ ID NO: 14246 - DNA, 26 bp, Homo sapiens
ttttgttagtgacagggtctcacttt

SEQ ID NO: 14247 - DNA, 26 bp, Homo sapiens
tttgttagtgacagggtctcacttta

SEQ ID NO: 14248 - DNA, 26 bp, Homo sapiens
ttgttagtgacagggtctcactttat

SEQ ID NO: 14249 - DNA, 26 bp, Homo sapiens
tgttagtgacagggtctcactttatt

SEQ ID NO: 14250 - DNA, 26 bp, Homo sapiens
gttagtgacagggtctcactttattg

SEQ ID NO: 14251 - DNA, 26 bp, Homo sapiens
ttagtgacagggtctcactttattgc

SEQ ID NO: 14252 - DNA, 26 bp, Homo sapiens
tagtgacagggtctcactttattgcc

SEQ ID NO: 14253 - DNA, 26 bp, Homo sapiens
agtgacagggtctcactttattgccc

SEQ ID NO: 14254 - DNA, 26 bp, Homo sapiens
gtgacagggtctcactttattgccca

SEQ ID NO: 14255 - DNA, 26 bp, Homo sapiens
tgacagggtctcactttattgcccag

SEQ ID NO: 14256 - DNA, 26 bp, Homo sapiens
gacagggtctcactttattgcccagg

SEQ ID NO: 14257 - DNA, 26 bp, Homo sapiens
acagggtctcactttattgcccaggc

SEQ ID NO: 14258 - DNA, 26 bp, Homo sapiens
cagggtctcactttattgcccaggct

SEQ ID NO: 14259 - DNA, 26 bp, Homo sapiens
agggtctcactttattgcccaggctg

SEQ ID NO: 14260 - DNA, 26 bp, Homo sapiens
gggtctcactttattgcccaggctgt

SEQ ID NO: 14261 - DNA, 26 bp, Homo sapiens
ggtctcactttattgcccaggctgta

SEQ ID NO: 14262 - DNA, 26 bp, Homo sapiens
gtctcactttattgcccaggctgtaa

SEQ ID NO: 14263 - DNA, 26 bp, Homo sapiens
tctcactttattgcccaggctgtaac

SEQ ID NO: 14264 - DNA, 26 bp, Homo sapiens
ctcactttattgcccaggctgtaact

SEQ ID NO: 14265 - DNA, 26 bp, Homo sapiens
tcactttattgcccaggctgtaactc

SEQ ID NO: 14266 - DNA, 26 bp, Homo sapiens
cactttattgcccaggctgtaactcg

SEQ ID NO: 14267 - DNA, 26 bp, Homo sapiens
actttattgcccaggctgtaactcga

SEQ ID NO: 14268 - DNA, 26 bp, Homo sapiens
ctttattgcccaggctgtaactcgaa

SEQ ID NO: 14269 - DNA, 26 bp, Homo sapiens
tttattgcccaggctgtaactcgaac

SEQ ID NO: 14270 - DNA, 26 bp, Homo sapiens
ttattgcccaggctgtaactcgaact

SEQ ID NO: 14271 - DNA, 26 bp, Homo sapiens
tattgcccaggctgtaactcgaactc

SEQ ID NO: 14272 - DNA, 26 bp, Homo sapiens
attgcccaggctgtaactcgaactcc

SEQ ID NO: 14273 - DNA, 26 bp, Homo sapiens
ttgcccaggctgtaactcgaactcct

SEQ ID NO: 14274 - DNA, 26 bp, Homo sapiens
tgcccaggctgtaactcgaactcctg

SEQ ID NO: 14275 - DNA, 26 bp, Homo sapiens
gcccaggctgtaactcgaactcctga

SEQ ID NO: 14276 - DNA, 26 bp, Homo sapiens
cccaggctgtaactcgaactcctgaa

SEQ ID NO: 14277 - DNA, 26 bp, Homo sapiens
ccaggctgtaactcgaactcctgaac

SEQ ID NO: 14278 - DNA, 26 bp, Homo sapiens
caggctgtaactcgaactcctgaact

SEQ ID NO: 14279 - DNA, 26 bp, Homo sapiens
aggctgtaactcgaactcctgaactc

SEQ ID NO: 14280 - DNA, 26 bp, Homo sapiens
ggctgtaactcgaactcctgaactca

SEQ ID NO: 14281 - DNA, 26 bp, Homo sapiens
gctgtaactcgaactcctgaactcaa

SEQ ID NO: 14282 - DNA, 26 bp, Homo sapiens
ctgtaactcgaactcctgaactcaaa

SEQ ID NO: 14283 - DNA, 26 bp, Homo sapiens
tgtaactcgaactcctgaactcaaat

SEQ ID NO: 14284 - DNA, 26 bp, Homo sapiens
gtaactcgaactcctgaactcaaatg

SEQ ID NO: 14285 - DNA, 26 bp, Homo sapiens
taactcgaactcctgaactcaaatga

SEQ ID NO: 14286 - DNA, 26 bp, Homo sapiens
aactcgaactcctgaactcaaatgat

SEQ ID NO: 14287 - DNA, 26 bp, Homo sapiens
actcgaactcctgaactcaaatgatc

SEQ ID NO: 14288 - DNA, 26 bp, Homo sapiens
ctcgaactcctgaactcaaatgatct

SEQ ID NO: 14289 - DNA, 26 bp, Homo sapiens
tcgaactcctgaactcaaatgatctt

SEQ ID NO: 14290 - DNA, 26 bp, Homo sapiens
cgaactcctgaactcaaatgatcttc

SEQ ID NO: 14291 - DNA, 26 bp, Homo sapiens
gaactcctgaactcaaatgatcttcc

SEQ ID NO: 14292 - DNA, 26 bp, Homo sapiens
aactcctgaactcaaatgatcttccc

SEQ ID NO: 14293 - DNA, 26 bp, Homo sapiens
actcctgaactcaaatgatcttccca

SEQ ID NO: 14294 - DNA, 26 bp, Homo sapiens
ctcctgaactcaaatgatcttcccac

SEQ ID NO: 14295 - DNA, 26 bp, Homo sapiens
tcctgaactcaaatgatcttcccacc

SEQ ID NO: 14296 - DNA, 26 bp, Homo sapiens
cctgaactcaaatgatcttcccacct

SEQ ID NO: 14297 - DNA, 26 bp, Homo sapiens
ctgaactcaaatgatcttcccacctt

SEQ ID NO: 14298 - DNA, 26 bp, Homo sapiens
tgaactcaaatgatcttcccaccttg

SEQ ID NO: 14299 - DNA, 26 bp, Homo sapiens
gaactcaaatgatcttcccaccttgg

SEQ ID NO: 14300 - DNA, 26 bp, Homo sapiens
aactcaaatgatcttcccaccttggc

SEQ ID NO: 14301 - DNA, 26 bp, Homo sapiens
actcaaatgatcttcccaccttggcc

SEQ ID NO: 14302 - DNA, 26 bp, Homo sapiens
ctcaaatgatcttcccaccttggcct

SEQ ID NO: 14303 - DNA, 26 bp, Homo sapiens
tcaaatgatcttcccaccttggcctc

SEQ ID NO: 14304 - DNA, 26 bp, Homo sapiens
caaatgatcttcccaccttggcctcc

SEQ ID NO: 14305 - DNA, 26 bp, Homo sapiens
aaatgatcttcccaccttggcctcct

SEQ ID NO: 14306 - DNA, 26 bp, Homo sapiens
aatgatcttcccaccttggcctcctg

SEQ ID NO: 14307 - DNA, 26 bp, Homo sapiens
atgatcttcccaccttggcctcctga

SEQ ID NO: 14308 - DNA, 26 bp, Homo sapiens
tgatcttcccaccttggcctcctgaa

SEQ ID NO: 14309 - DNA, 26 bp, Homo sapiens
gatcttcccaccttggcctcctgaag

SEQ ID NO: 14310 - DNA, 26 bp, Homo sapiens
atcttcccaccttggcctcctgaagt

SEQ ID NO: 14311 - DNA, 26 bp, Homo sapiens
tcttcccaccttggcctcctgaagtg

SEQ ID NO: 14312 - DNA, 26 bp, Homo sapiens
cttcccaccttggcctcctgaagtgc

SEQ ID NO: 14313 - DNA, 26 bp, Homo sapiens
ttcccaccttggcctcctgaagtgct

SEQ ID NO: 14314 - DNA, 26 bp, Homo sapiens
tcccaccttggcctcctgaagtgctg

SEQ ID NO: 14315 - DNA, 26 bp, Homo sapiens
cccaccttggcctcctgaagtgctgg

SEQ ID NO: 14316 - DNA, 26 bp, Homo sapiens
ccaccttggcctcctgaagtgctgga

SEQ ID NO: 14317 - DNA, 26 bp, Homo sapiens
caccttggcctcctgaagtgctggaa

SEQ ID NO: 14318 - DNA, 26 bp, Homo sapiens
accttggcctcctgaagtgctggaat

SEQ ID NO: 14319 - DNA, 26 bp, Homo sapiens
ccttggcctcctgaagtgctggaatt

SEQ ID NO: 14320 - DNA, 26 bp, Homo sapiens
cttggcctcctgaagtgctggaatta

SEQ ID NO: 14321 - DNA, 26 bp, Homo sapiens
ttggcctcctgaagtgctggaattac

SEQ ID NO: 14322 - DNA, 26 bp, Homo sapiens
tggcctcctgaagtgctggaattaca

SEQ ID NO: 14323 - DNA, 26 bp, Homo sapiens
ggcctcctgaagtgctggaattacag

SEQ ID NO: 14324 - DNA, 26 bp, Homo sapiens
gcctcctgaagtgctggaattacagg

SEQ ID NO: 14325 - DNA, 26 bp, Homo sapiens
cctcctgaagtgctggaattacaggt

SEQ ID NO: 14326 - DNA, 26 bp, Homo sapiens
ctcctgaagtgctggaattacaggtg

SEQ ID NO: 14327 - DNA, 26 bp, Homo sapiens
tcctgaagtgctggaattacaggtgt

SEQ ID NO: 14328 - DNA, 26 bp, Homo sapiens
cctgaagtgctggaattacaggtgtg

SEQ ID NO: 14329 - DNA, 26 bp, Homo sapiens
ctgaagtgctggaattacaggtgtga

SEQ ID NO: 14330 - DNA, 26 bp, Homo sapiens
tgaagtgctggaattacaggtgtgag

SEQ ID NO: 14331 - DNA, 26 bp, Homo sapiens
gaagtgctggaattacaggtgtgagt

SEQ ID NO: 14332 - DNA, 26 bp, Homo sapiens
aagtgctggaattacaggtgtgagtc

SEQ ID NO: 14333 - DNA, 26 bp, Homo sapiens
agtgctggaattacaggtgtgagtca

SEQ ID NO: 14334 - DNA, 26 bp, Homo sapiens
gtgctggaattacaggtgtgagtcac

SEQ ID NO: 14335 - DNA, 26 bp, Homo sapiens
tgctggaattacaggtgtgagtcacc

SEQ ID NO: 14336 - DNA, 26 bp, Homo sapiens
gctggaattacaggtgtgagtcacca

SEQ ID NO: 14337 - DNA, 26 bp, Homo sapiens
ctggaattacaggtgtgagtcaccac

SEQ ID NO: 14338 - DNA, 26 bp, Homo sapiens
tggaattacaggtgtgagtcaccacg

SEQ ID NO: 14339 - DNA, 26 bp, Homo sapiens
ggaattacaggtgtgagtcaccacgc

SEQ ID NO: 14340 - DNA, 26 bp, Homo sapiens
gaattacaggtgtgagtcaccacgcc

SEQ ID NO: 14341 - DNA, 26 bp, Homo sapiens
aattacaggtgtgagtcaccacgcct

SEQ ID NO: 14342 - DNA, 26 bp, Homo sapiens
attacaggtgtgagtcaccacgcctg

SEQ ID NO: 14343 - DNA, 26 bp, Homo sapiens
ttacaggtgtgagtcaccacgcctgg

SEQ ID NO: 14344 - DNA, 26 bp, Homo sapiens
tacaggtgtgagtcaccacgcctggc

SEQ ID NO: 14345 - DNA, 26 bp, Homo sapiens
acaggtgtgagtcaccacgcctggcc

SEQ ID NO: 14346 - DNA, 26 bp, Homo sapiens
caggtgtgagtcaccacgcctggcct

SEQ ID NO: 14347 - DNA, 26 bp, Homo sapiens
aggtgtgagtcaccacgcctggccta

SEQ ID NO: 14348 - DNA, 26 bp, Homo sapiens
ggtgtgagtcaccacgcctggcctaa

SEQ ID NO: 14349 - DNA, 26 bp, Homo sapiens
gtgtgagtcaccacgcctggcctaag

SEQ ID NO: 14350 - DNA, 26 bp, Homo sapiens
tgtgagtcaccacgcctggcctaaga

SEQ ID NO: 14351 - DNA, 26 bp, Homo sapiens
gtgagtcaccacgcctggcctaagag

SEQ ID NO: 14352 - DNA, 26 bp, Homo sapiens
tgagtcaccacgcctggcctaagagt

SEQ ID NO: 14353 - DNA, 26 bp, Homo sapiens
gagtcaccacgcctggcctaagagta

SEQ ID NO: 14354 - DNA, 26 bp, Homo sapiens
agtcaccacgcctggcctaagagtat

SEQ ID NO: 14355 - DNA, 26 bp, Homo sapiens
gtcaccacgcctggcctaagagtata

SEQ ID NO: 14356 - DNA, 26 bp, Homo sapiens
tcaccacgcctggcctaagagtatac

SEQ ID NO: 14357 - DNA, 26 bp, Homo sapiens
caccacgcctggcctaagagtatact

SEQ ID NO: 14358 - DNA, 26 bp, Homo sapiens
accacgcctggcctaagagtatactt

SEQ ID NO: 14359 - DNA, 26 bp, Homo sapiens
ccacgcctggcctaagagtatacttt

SEQ ID NO: 14360 - DNA, 26 bp, Homo sapiens
cacgcctggcctaagagtatacttta

SEQ ID NO: 14361 - DNA, 26 bp, Homo sapiens
acgcctggcctaagagtatactttaa

SEQ ID NO: 14362 - DNA, 26 bp, Homo sapiens
cgcctggcctaagagtatactttaaa

SEQ ID NO: 14363 - DNA, 26 bp, Homo sapiens
gcctggcctaagagtatactttaaac

SEQ ID NO: 14364 - DNA, 26 bp, Homo sapiens
cctggcctaagagtatactttaaaca

SEQ ID NO: 14365 - DNA, 26 bp, Homo sapiens
ctggcctaagagtatactttaaacaa

SEQ ID NO: 14366 - DNA, 26 bp, Homo sapiens
tggcctaagagtatactttaaacaaa

SEQ ID NO: 14367 - DNA, 26 bp, Homo sapiens
ggcctaagagtatactttaaacaaat

SEQ ID NO: 14368 - DNA, 26 bp, Homo sapiens
gcctaagagtatactttaaacaaatt

SEQ ID NO: 14369 - DNA, 26 bp, Homo sapiens
cctaagagtatactttaaacaaattt

SEQ ID NO: 14370 - DNA, 26 bp, Homo sapiens
ctaagagtatactttaaacaaatttt

SEQ ID NO: 14371 - DNA, 26 bp, Homo sapiens
taagagtatactttaaacaaattttt

SEQ ID NO: 14372 - DNA, 26 bp, Homo sapiens
aagagtatactttaaacaaatttttt

SEQ ID NO: 14373 - DNA, 26 bp, Homo sapiens
agagtatactttaaacaaatttttta

SEQ ID NO: 14374 - DNA, 26 bp, Homo sapiens
gagtatactttaaacaaattttttaa

SEQ ID NO: 14375 - DNA, 26 bp, Homo sapiens
agtatactttaaacaaattttttaaa

SEQ ID NO: 14376 - DNA, 26 bp, Homo sapiens
gtatactttaaacaaattttttaaaa

SEQ ID NO: 14377 - DNA, 26 bp, Homo sapiens
tatactttaaacaaattttttaaaat

SEQ ID NO: 14378 - DNA, 26 bp, Homo sapiens
atactttaaacaaattttttaaaatg

SEQ ID NO: 14379 - DNA, 26 bp, Homo sapiens
tactttaaacaaattttttaaaatgt

SEQ ID NO: 14380 - DNA, 26 bp, Homo sapiens
actttaaacaaattttttaaaatgtg

SEQ ID NO: 14381 - DNA, 26 bp, Homo sapiens
ctttaaacaaattttttaaaatgtgt

SEQ ID NO: 14382 - DNA, 26 bp, Homo sapiens
tttaaacaaattttttaaaatgtgtg

SEQ ID NO: 14383 - DNA, 26 bp, Homo sapiens
ttaaacaaattttttaaaatgtgtgt

SEQ ID NO: 14384 - DNA, 26 bp, Homo sapiens
taaacaaattttttaaaatgtgtgtt

SEQ ID NO: 14385 - DNA, 26 bp, Homo sapiens
aaacaaattttttaaaatgtgtgttg

SEQ ID NO: 14386 - DNA, 26 bp, Homo sapiens
aacaaattttttaaaatgtgtgttga

SEQ ID NO: 14387 - DNA, 26 bp, Homo sapiens
acaaattttttaaaatgtgtgttgat

SEQ ID NO: 14388 - DNA, 26 bp, Homo sapiens
caaattttttaaaatgtgtgttgata

SEQ ID NO: 14389 - DNA, 26 bp, Homo sapiens
aaattttttaaaatgtgtgttgatac

SEQ ID NO: 14390 - DNA, 26 bp, Homo sapiens
aattttttaaaatgtgtgttgataca

SEQ ID NO: 14391 - DNA, 26 bp, Homo sapiens
attttttaaaatgtgtgttgatacat

SEQ ID NO: 14392 - DNA, 26 bp, Homo sapiens
ttttttaaaatgtgtgttgatacatt

SEQ ID NO: 14393 - DNA, 26 bp, Homo sapiens
tttttaaaatgtgtgttgatacattt

SEQ ID NO: 14394 - DNA, 26 bp, Homo sapiens
ttttaaaatgtgtgttgatacatttt

SEQ ID NO: 14395 - DNA, 26 bp, Homo sapiens
tttaaaatgtgtgttgatacatttta

SEQ ID NO: 14396 - DNA, 26 bp, Homo sapiens
ttaaaatgtgtgttgatacattttat

SEQ ID NO: 14397 - DNA, 26 bp, Homo sapiens
taaaatgtgtgttgatacattttata

SEQ ID NO: 14398 - DNA, 26 bp, Homo sapiens
aaaatgtgtgttgatacattttatag

SEQ ID NO: 14399 - DNA, 26 bp, Homo sapiens
aaatgtgtgttgatacattttataga

SEQ ID NO: 14400 - DNA, 26 bp, Homo sapiens
aatgtgtgttgatacattttatagat

SEQ ID NO: 14401 - DNA, 26 bp, Homo sapiens
atgtgtgttgatacattttatagatg

SEQ ID NO: 14402 - DNA, 26 bp, Homo sapiens
tgtgtgttgatacattttatagatgt

SEQ ID NO: 14403 - DNA, 26 bp, Homo sapiens
gtgtgttgatacattttatagatgtt

SEQ ID NO: 14404 - DNA, 26 bp, Homo sapiens
tgtgttgatacattttatagatgttc

SEQ ID NO: 14405 - DNA, 26 bp, Homo sapiens
gtgttgatacattttatagatgttca

SEQ ID NO: 14406 - DNA, 26 bp, Homo sapiens
tgttgatacattttatagatgttcat

SEQ ID NO: 14407 - DNA, 26 bp, Homo sapiens
gttgatacattttatagatgttcatt

SEQ ID NO: 14408 - DNA, 26 bp, Homo sapiens
ttgatacattttatagatgttcattt

SEQ ID NO: 14409 - DNA, 26 bp, Homo sapiens
tgatacattttatagatgttcattta

SEQ ID NO: 14410 - DNA, 26 bp, Homo sapiens
gatacattttatagatgttcatttaa

SEQ ID NO: 14411 - DNA, 26 bp, Homo sapiens
atacattttatagatgttcatttaat

SEQ ID NO: 14412 - DNA, 26 bp, Homo sapiens
tacattttatagatgttcatttaata

SEQ ID NO: 14413 - DNA, 26 bp, Homo sapiens
acattttatagatgttcatttaatac

SEQ ID NO: 14414 - DNA, 26 bp, Homo sapiens
cattttatagatgttcatttaataca

SEQ ID NO: 14415 - DNA, 26 bp, Homo sapiens
attttatagatgttcatttaatacac

SEQ ID NO: 14416 - DNA, 26 bp, Homo sapiens
ttttatagatgttcatttaatacact

SEQ ID NO: 14417 - DNA, 26 bp, Homo sapiens
tttatagatgttcatttaatacacta

SEQ ID NO: 14418 - DNA, 26 bp, Homo sapiens
ttatagatgttcatttaatacactac

SEQ ID NO: 14419 - DNA, 26 bp, Homo sapiens
tatagatgttcatttaatacactact

SEQ ID NO: 14420 - DNA, 26 bp, Homo sapiens
atagatgttcatttaatacactactg

SEQ ID NO: 14421 - DNA, 26 bp, Homo sapiens
tagatgttcatttaatacactactgt

SEQ ID NO: 14422 - DNA, 26 bp, Homo sapiens
agatgttcatttaatacactactgtt

SEQ ID NO: 14423 - DNA, 26 bp, Homo sapiens
gatgttcatttaatacactactgttt

SEQ ID NO: 14424 - DNA, 26 bp, Homo sapiens
atgttcatttaatacactactgtttt

SEQ ID NO: 14425 - DNA, 26 bp, Homo sapiens
tgttcatttaatacactactgtttta

SEQ ID NO: 14426 - DNA, 26 bp, Homo sapiens
gttcatttaatacactactgttttag

SEQ ID NO: 14427 - DNA, 26 bp, Homo sapiens
ttcatttaatacactactgttttagg

SEQ ID NO: 14428 - DNA, 26 bp, Homo sapiens
tcatttaatacactactgttttagga

SEQ ID NO: 14429 - DNA, 26 bp, Homo sapiens
catttaatacactactgttttaggaa

SEQ ID NO: 14430 - DNA, 26 bp, Homo sapiens
atttaatacactactgttttaggaaa

SEQ ID NO: 14431 - DNA, 26 bp, Homo sapiens
tttaatacactactgttttaggaaag

SEQ ID NO: 14432 - DNA, 26 bp, Homo sapiens
ttaatacactactgttttaggaaagc

SEQ ID NO: 14433 - DNA, 26 bp, Homo sapiens
taatacactactgttttaggaaagcg

SEQ ID NO: 14434 - DNA, 26 bp, Homo sapiens
aatacactactgttttaggaaagcga

SEQ ID NO: 14435 - DNA, 26 bp, Homo sapiens
atacactactgttttaggaaagcgat

SEQ ID NO: 14436 - DNA, 26 bp, Homo sapiens
tacactactgttttaggaaagcgatt

SEQ ID NO: 14437 - DNA, 26 bp, Homo sapiens
acactactgttttaggaaagcgattg

SEQ ID NO: 14438 - DNA, 26 bp, Homo sapiens
cactactgttttaggaaagcgattgc

SEQ ID NO: 14439 - DNA, 26 bp, Homo sapiens
actactgttttaggaaagcgattgca

SEQ ID NO: 14440 - DNA, 26 bp, Homo sapiens
ctactgttttaggaaagcgattgcag

SEQ ID NO: 14441 - DNA, 26 bp, Homo sapiens
tactgttttaggaaagcgattgcagc

SEQ ID NO: 14442 - DNA, 26 bp, Homo sapiens
actgttttaggaaagcgattgcagct

SEQ ID NO: 14443 - DNA, 26 bp, Homo sapiens
ctgttttaggaaagcgattgcagctc

SEQ ID NO: 14444 - DNA, 26 bp, Homo sapiens
tgttttaggaaagcgattgcagctca

SEQ ID NO: 14445 - DNA, 26 bp, Homo sapiens
gttttaggaaagcgattgcagctcag

SEQ ID NO: 14446 - DNA, 26 bp, Homo sapiens
ttttaggaaagcgattgcagctcagt

SEQ ID NO: 14447 - DNA, 26 bp, Homo sapiens
tttaggaaagcgattgcagctcagtt

SEQ ID NO: 14448 - DNA, 26 bp, Homo sapiens
ttaggaaagcgattgcagctcagttt

SEQ ID NO: 14449 - DNA, 26 bp, Homo sapiens
taggaaagcgattgcagctcagtttt

SEQ ID NO: 14450 - DNA, 26 bp, Homo sapiens
aggaaagcgattgcagctcagttttc

SEQ ID NO: 14451 - DNA, 26 bp, Homo sapiens
ggaaagcgattgcagctcagttttct

SEQ ID NO: 14452 - DNA, 26 bp, Homo sapiens
gaaagcgattgcagctcagttttctg

SEQ ID NO: 14453 - DNA, 26 bp, Homo sapiens
aaagcgattgcagctcagttttctga

SEQ ID NO: 14454 - DNA, 26 bp, Homo sapiens
aagcgattgcagctcagttttctgaa

SEQ ID NO: 14455 - DNA, 26 bp, Homo sapiens
agcgattgcagctcagttttctgaaa

SEQ ID NO: 14456 - DNA, 26 bp, Homo sapiens
gcgattgcagctcagttttctgaaat

SEQ ID NO: 14457 - DNA, 26 bp, Homo sapiens
cgattgcagctcagttttctgaaatc

SEQ ID NO: 14458 - DNA, 26 bp, Homo sapiens
gattgcagctcagttttctgaaatct

SEQ ID NO: 14459 - DNA, 26 bp, Homo sapiens
attgcagctcagttttctgaaatctg

SEQ ID NO: 14460 - DNA, 26 bp, Homo sapiens
ttgcagctcagttttctgaaatctgg

SEQ ID NO: 14461 - DNA, 26 bp, Homo sapiens
tgcagctcagttttctgaaatctggc

SEQ ID NO: 14462 - DNA, 26 bp, Homo sapiens
gcagctcagttttctgaaatctggca

SEQ ID NO: 14463 - DNA, 26 bp, Homo sapiens
cagctcagttttctgaaatctggcaa

SEQ ID NO: 14464 - DNA, 26 bp, Homo sapiens
agctcagttttctgaaatctggcaac

SEQ ID NO: 14465 - DNA, 26 bp, Homo sapiens
gctcagttttctgaaatctggcaaca

SEQ ID NO: 14466 - DNA, 26 bp, Homo sapiens
ctcagttttctgaaatctggcaacaa

SEQ ID NO: 14467 - DNA, 26 bp, Homo sapiens
tcagttttctgaaatctggcaacaaa

SEQ ID NO: 14468 - DNA, 26 bp, Homo sapiens
cagttttctgaaatctggcaacaaat

SEQ ID NO: 14469 - DNA, 26 bp, Homo sapiens
agttttctgaaatctggcaacaaatg

SEQ ID NO: 14470 - DNA, 26 bp, Homo sapiens
gttttctgaaatctggcaacaaatgt

SEQ ID NO: 14471 - DNA, 26 bp, Homo sapiens
ttttctgaaatctggcaacaaatgtg

SEQ ID NO: 14472 - DNA, 26 bp, Homo sapiens
tttctgaaatctggcaacaaatgtgt

SEQ ID NO: 14473 - DNA, 26 bp, Homo sapiens
ttctgaaatctggcaacaaatgtgtg

SEQ ID NO: 14474 - DNA, 26 bp, Homo sapiens
tctgaaatctggcaacaaatgtgtgg

SEQ ID NO: 14475 - DNA, 26 bp, Homo sapiens
ctgaaatctggcaacaaatgtgtgga

SEQ ID NO: 14476 - DNA, 26 bp, Homo sapiens
tgaaatctggcaacaaatgtgtggat

SEQ ID NO: 14477 - DNA, 26 bp, Homo sapiens
gaaatctggcaacaaatgtgtggata

SEQ ID NO: 14478 - DNA, 26 bp, Homo sapiens
aaatctggcaacaaatgtgtggatat

SEQ ID NO: 14479 - DNA, 26 bp, Homo sapiens
aatctggcaacaaatgtgtggatata

SEQ ID NO: 14480 - DNA, 26 bp, Homo sapiens
atctggcaacaaatgtgtggatatat

SEQ ID NO: 14481 - DNA, 26 bp, Homo sapiens
tctggcaacaaatgtgtggatatatt

SEQ ID NO: 14482 - DNA, 26 bp, Homo sapiens
ctggcaacaaatgtgtggatatatta

SEQ ID NO: 14483 - DNA, 26 bp, Homo sapiens
tggcaacaaatgtgtggatatattag

SEQ ID NO: 14484 - DNA, 26 bp, Homo sapiens
ggcaacaaatgtgtggatatattaga

SEQ ID NO: 14485 - DNA, 26 bp, Homo sapiens
gcaacaaatgtgtggatatattagag

SEQ ID NO: 14486 - DNA, 26 bp, Homo sapiens
caacaaatgtgtggatatattagaga

SEQ ID NO: 14487 - DNA, 26 bp, Homo sapiens
aacaaatgtgtggatatattagagat

SEQ ID NO: 14488 - DNA, 26 bp, Homo sapiens
acaaatgtgtggatatattagagata

SEQ ID NO: 14489 - DNA, 26 bp, Homo sapiens
caaatgtgtggatatattagagatat

SEQ ID NO: 14490 - DNA, 26 bp, Homo sapiens
aaatgtgtggatatattagagatatt

SEQ ID NO: 14491 - DNA, 26 bp, Homo sapiens
aatgtgtggatatattagagatatta

SEQ ID NO: 14492 - DNA, 26 bp, Homo sapiens
atgtgtggatatattagagatattat

SEQ ID NO: 14493 - DNA, 26 bp, Homo sapiens
tgtgtggatatattagagatattatt

SEQ ID NO: 14494 - DNA, 26 bp, Homo sapiens
gtgtggatatattagagatattattt

SEQ ID NO: 14495 - DNA, 26 bp, Homo sapiens
tgtggatatattagagatattatttg

SEQ ID NO: 14496 - DNA, 26 bp, Homo sapiens
gtggatatattagagatattatttgt

SEQ ID NO: 14497 - DNA, 26 bp, Homo sapiens
tggatatattagagatattatttgtt

SEQ ID NO: 14498 - DNA, 26 bp, Homo sapiens
ggatatattagagatattatttgttt

SEQ ID NO: 14499 - DNA, 26 bp, Homo sapiens
gatatattagagatattatttgtttt

SEQ ID NO: 14500 - DNA, 26 bp, Homo sapiens
atatattagagatattatttgttttt

SEQ ID NO: 14501 - DNA, 26 bp, Homo sapiens
tatattagagatattatttgttttta

SEQ ID NO: 14502 - DNA, 26 bp, Homo sapiens
atattagagatattatttgtttttat

SEQ ID NO: 14503 - DNA, 26 bp, Homo sapiens
tattagagatattatttgtttttatt

SEQ ID NO: 14504 - DNA, 26 bp, Homo sapiens
attagagatattatttgtttttatta

SEQ ID NO: 14505 - DNA, 26 bp, Homo sapiens
ttagagatattatttgtttttattaa

SEQ ID NO: 14506 - DNA, 26 bp, Homo sapiens
tagagatattatttgtttttattaaa

SEQ ID NO: 14507 - DNA, 26 bp, Homo sapiens
agagatattatttgtttttattaaaa

SEQ ID NO: 14508 - DNA, 26 bp, Homo sapiens
gagatattatttgtttttattaaaat

SEQ ID NO: 14509 - DNA, 26 bp, Homo sapiens
agatattatttgtttttattaaaata

SEQ ID NO: 14510 - DNA, 26 bp, Homo sapiens
gatattatttgtttttattaaaatat

SEQ ID NO: 14511 - DNA, 26 bp, Homo sapiens
atattatttgtttttattaaaatata

SEQ ID NO: 14512 - DNA, 26 bp, Homo sapiens
tattatttgtttttattaaaatatat

SEQ ID NO: 14513 - DNA, 26 bp, Homo sapiens
attatttgtttttattaaaatatatt

SEQ ID NO: 14514 - DNA, 26 bp, Homo sapiens
ttatttgtttttattaaaatatattc

SEQ ID NO: 14515 - DNA, 26 bp, Homo sapiens
tatttgtttttattaaaatatattcc

SEQ ID NO: 14516 - DNA, 26 bp, Homo sapiens
atttgtttttattaaaatatattcca

SEQ ID NO: 14517 - DNA, 26 bp, Homo sapiens
tttgtttttattaaaatatattccat

SEQ ID NO: 14518 - DNA, 26 bp, Homo sapiens
ttgtttttattaaaatatattccatg

SEQ ID NO: 14519 - DNA, 26 bp, Homo sapiens
tgtttttattaaaatatattccatgt

SEQ ID NO: 14520 - DNA, 26 bp, Homo sapiens
gtttttattaaaatatattccatgtg

SEQ ID NO: 14521 - DNA, 26 bp, Homo sapiens
tttttattaaaatatattccatgtgc

SEQ ID NO: 14522 - DNA, 26 bp, Homo sapiens
ttttattaaaatatattccatgtgcc

SEQ ID NO: 14523 - DNA, 26 bp, Homo sapiens
tttattaaaatatattccatgtgcct

SEQ ID NO: 14524 - DNA, 26 bp, Homo sapiens
ttattaaaatatattccatgtgcctt

SEQ ID NO: 14525 - DNA, 26 bp, Homo sapiens
tattaaaatatattccatgtgccttt

SEQ ID NO: 14526 - DNA, 26 bp, Homo sapiens
attaaaatatattccatgtgcctttg

SEQ ID NO: 14527 - DNA, 26 bp, Homo sapiens
ttaaaatatattccatgtgcctttga

SEQ ID NO: 14528 - DNA, 26 bp, Homo sapiens
taaaatatattccatgtgcctttgat

SEQ ID NO: 14529 - DNA, 26 bp, Homo sapiens
aaaatatattccatgtgcctttgata

SEQ ID NO: 14530 - DNA, 26 bp, Homo sapiens
aaatatattccatgtgcctttgatat

SEQ ID NO: 14531 - DNA, 26 bp, Homo sapiens
aatatattccatgtgcctttgatatc

SEQ ID NO: 14532 - DNA, 26 bp, Homo sapiens
atatattccatgtgcctttgatatct

SEQ ID NO: 14533 - DNA, 26 bp, Homo sapiens
tatattccatgtgcctttgatatctt

SEQ ID NO: 14534 - DNA, 26 bp, Homo sapiens
atattccatgtgcctttgatatcttt

SEQ ID NO: 14535 - DNA, 26 bp, Homo sapiens
tattccatgtgcctttgatatctttt

SEQ ID NO: 14536 - DNA, 26 bp, Homo sapiens
attccatgtgcctttgatatcttttt

SEQ ID NO: 14537 - DNA, 26 bp, Homo sapiens
ttccatgtgcctttgatatctttttg

SEQ ID NO: 14538 - DNA, 26 bp, Homo sapiens
tccatgtgcctttgatatctttttga

SEQ ID NO: 14539 - DNA, 26 bp, Homo sapiens
ccatgtgcctttgatatctttttgat

SEQ ID NO: 14540 - DNA, 26 bp, Homo sapiens
catgtgcctttgatatctttttgata

SEQ ID NO: 14541 - DNA, 26 bp, Homo sapiens
atgtgcctttgatatctttttgatag

SEQ ID NO: 14542 - DNA, 26 bp, Homo sapiens
tgtgcctttgatatctttttgatagg

SEQ ID NO: 14543 - DNA, 26 bp, Homo sapiens
gtgcctttgatatctttttgatagga

SEQ ID NO: 14544 - DNA, 26 bp, Homo sapiens
tgcctttgatatctttttgataggaa

SEQ ID NO: 14545 - DNA, 26 bp, Homo sapiens
gcctttgatatctttttgataggaag

SEQ ID NO: 14546 - DNA, 26 bp, Homo sapiens
cctttgatatctttttgataggaaga

SEQ ID NO: 14547 - DNA, 26 bp, Homo sapiens
ctttgatatctttttgataggaagac

SEQ ID NO: 14548 - DNA, 26 bp, Homo sapiens
tttgatatctttttgataggaagaca

SEQ ID NO: 14549 - DNA, 26 bp, Homo sapiens
ttgatatctttttgataggaagacat

SEQ ID NO: 14550 - DNA, 26 bp, Homo sapiens
tgatatctttttgataggaagacatc

SEQ ID NO: 14551 - DNA, 26 bp, Homo sapiens
gatatctttttgataggaagacatct

SEQ ID NO: 14552 - DNA, 26 bp, Homo sapiens
atatctttttgataggaagacatctt

SEQ ID NO: 14553 - DNA, 26 bp, Homo sapiens
tatctttttgataggaagacatctta

SEQ ID NO: 14554 - DNA, 26 bp, Homo sapiens
atctttttgataggaagacatcttac

SEQ ID NO: 14555 - DNA, 26 bp, Homo sapiens
tctttttgataggaagacatcttaca

SEQ ID NO: 14556 - DNA, 26 bp, Homo sapiens
ctttttgataggaagacatcttacac

SEQ ID NO: 14557 - DNA, 26 bp, Homo sapiens
tttttgataggaagacatcttacaca

SEQ ID NO: 14558 - DNA, 26 bp, Homo sapiens
ttttgataggaagacatcttacacac

SEQ ID NO: 14559 - DNA, 26 bp, Homo sapiens
tttgataggaagacatcttacacaca

SEQ ID NO: 14560 - DNA, 26 bp, Homo sapiens
ttgataggaagacatcttacacacac

SEQ ID NO: 14561 - DNA, 26 bp, Homo sapiens
tgataggaagacatcttacacacaca

SEQ ID NO: 14562 - DNA, 26 bp, Homo sapiens
gataggaagacatcttacacacacac

SEQ ID NO: 14563 - DNA, 26 bp, Homo sapiens
ataggaagacatcttacacacacaca

SEQ ID NO: 14564 - DNA, 26 bp, Homo sapiens
taggaagacatcttacacacacacac

SEQ ID NO: 14565 - DNA, 26 bp, Homo sapiens
aggaagacatcttacacacacacaca

SEQ ID NO: 14566 - DNA, 26 bp, Homo sapiens
ggaagacatcttacacacacacacac

SEQ ID NO: 14567 - DNA, 26 bp, Homo sapiens
gaagacatcttacacacacacacaca

SEQ ID NO: 14568 - DNA, 26 bp, Homo sapiens
aagacatcttacacacacacacacac

SEQ ID NO: 14569 - DNA, 26 bp, Homo sapiens
agacatcttacacacacacacacaca

SEQ ID NO: 14570 - DNA, 26 bp, Homo sapiens
gacatcttacacacacacacacacac

SEQ ID NO: 14571 - DNA, 26 bp, Homo sapiens
acatcttacacacacacacacacaca

SEQ ID NO: 14572 - DNA, 26 bp, Homo sapiens
catcttacacacacacacacacacac

SEQ ID NO: 14573 - DNA, 26 bp, Homo sapiens
atcttacacacacacacacacacaca

SEQ ID NO: 14574 - DNA, 26 bp, Homo sapiens
tcttacacacacacacacacacacac

SEQ ID NO: 14575 - DNA, 26 bp, Homo sapiens
cttacacacacacacacacacacaca

SEQ ID NO: 14576 - DNA, 26 bp, Homo sapiens
ttacacacacacacacacacacacac

SEQ ID NO: 14577 - DNA, 26 bp, Homo sapiens
tacacacacacacacacacacacaca

SEQ ID NO: 14578 - DNA, 26 bp, Homo sapiens
acacacacacacacacacacacacac

SEQ ID NO: 14579 - DNA, 26 bp, Homo sapiens
cacacacacacacacacacacacaca

SEQ ID NO: 14580 - DNA, 26 bp, Homo sapiens
acacacacacacacacacacacacac

SEQ ID NO: 14581 - DNA, 26 bp, Homo sapiens
cacacacacacacacacacacacaca

SEQ ID NO: 14582 - DNA, 26 bp, Homo sapiens
acacacacacacacacacacacacat

SEQ ID NO: 14583 - DNA, 26 bp, Homo sapiens
cacacacacacacacacacacacata

SEQ ID NO: 14584 - DNA, 26 bp, Homo sapiens
acacacacacacacacacacacatat

SEQ ID NO: 14585 - DNA, 26 bp, Homo sapiens
cacacacacacacacacacacatata

SEQ ID NO: 14586 - DNA, 26 bp, Homo sapiens
acacacacacacacacacacatatat

SEQ ID NO: 14587 - DNA, 26 bp, Homo sapiens
cacacacacacacacacacatatata

SEQ ID NO: 14588 - DNA, 26 bp, Homo sapiens
acacacacacacacacacatatatat

SEQ ID NO: 14589 - DNA, 26 bp, Homo sapiens
cacacacacacacacacatatatata

SEQ ID NO: 14590 - DNA, 26 bp, Homo sapiens
acacacacacacacacatatatatat

SEQ ID NO: 14591 - DNA, 26 bp, Homo sapiens
cacacacacacacacatatatatata

SEQ ID NO: 14592 - DNA, 26 bp, Homo sapiens
acacacacacacacatatatatatat

SEQ ID NO: 14593 - DNA, 26 bp, Homo sapiens
cacacacacacacatatatatatatg

SEQ ID NO: 14594 - DNA, 26 bp, Homo sapiens
acacacacacacatatatatatatgg

SEQ ID NO: 14595 - DNA, 26 bp, Homo sapiens
cacacacacacatatatatatatgga

SEQ ID NO: 14596 - DNA, 26 bp, Homo sapiens
acacacacacatatatatatatggag

SEQ ID NO: 14597 - DNA, 26 bp, Homo sapiens
cacacacacatatatatatatggagt

SEQ ID NO: 14598 - DNA, 26 bp, Homo sapiens
acacacacatatatatatatggagta

SEQ ID NO: 14599 - DNA, 26 bp, Homo sapiens
cacacacatatatatatatggagtaa

SEQ ID NO: 14600 - DNA, 26 bp, Homo sapiens
acacacatatatatatatggagtaac

SEQ ID NO: 14601 - DNA, 26 bp, Homo sapiens
cacacatatatatatatggagtaaca

SEQ ID NO: 14602 - DNA, 26 bp, Homo sapiens
acacatatatatatatggagtaacaa

SEQ ID NO: 14603 - DNA, 26 bp, Homo sapiens
cacatatatatatatggagtaacaat

SEQ ID NO: 14604 - DNA, 26 bp, Homo sapiens
acatatatatatatggagtaacaatt

SEQ ID NO: 14605 - DNA, 26 bp, Homo sapiens
catatatatatatggagtaacaattt

SEQ ID NO: 14606 - DNA, 26 bp, Homo sapiens
atatatatatatggagtaacaatttg

SEQ ID NO: 14607 - DNA, 26 bp, Homo sapiens
tatatatatatggagtaacaatttgt

SEQ ID NO: 14608 - DNA, 26 bp, Homo sapiens
atatatatatggagtaacaatttgtc

SEQ ID NO: 14609 - DNA, 26 bp, Homo sapiens
tatatatatggagtaacaatttgtcg

SEQ ID NO: 14610 - DNA, 26 bp, Homo sapiens
atatatatggagtaacaatttgtcga

SEQ ID NO: 14611 - DNA, 26 bp, Homo sapiens
tatatatggagtaacaatttgtcgat

SEQ ID NO: 14612 - DNA, 26 bp, Homo sapiens
atatatggagtaacaatttgtcgatt

SEQ ID NO: 14613 - DNA, 26 bp, Homo sapiens
tatatggagtaacaatttgtcgattc

SEQ ID NO: 14614 - DNA, 26 bp, Homo sapiens
atatggagtaacaatttgtcgattct

SEQ ID NO: 14615 - DNA, 26 bp, Homo sapiens
tatggagtaacaatttgtcgattcta

SEQ ID NO: 14616 - DNA, 26 bp, Homo sapiens
atggagtaacaatttgtcgattctag

SEQ ID NO: 14617 - DNA, 26 bp, Homo sapiens
tggagtaacaatttgtcgattctagt

SEQ ID NO: 14618 - DNA, 26 bp, Homo sapiens
ggagtaacaatttgtcgattctagtc

SEQ ID NO: 14619 - DNA, 26 bp, Homo sapiens
gagtaacaatttgtcgattctagtca

SEQ ID NO: 14620 - DNA, 26 bp, Homo sapiens
agtaacaatttgtcgattctagtcaa

SEQ ID NO: 14621 - DNA, 26 bp, Homo sapiens
gtaacaatttgtcgattctagtcaac

SEQ ID NO: 14622 - DNA, 26 bp, Homo sapiens
taacaatttgtcgattctagtcaact

SEQ ID NO: 14623 - DNA, 26 bp, Homo sapiens
aacaatttgtcgattctagtcaactg

SEQ ID NO: 14624 - DNA, 26 bp, Homo sapiens
acaatttgtcgattctagtcaactgc

SEQ ID NO: 14625 - DNA, 26 bp, Homo sapiens
caatttgtcgattctagtcaactgcc

SEQ ID NO: 14626 - DNA, 26 bp, Homo sapiens
aatttgtcgattctagtcaactgcct

SEQ ID NO: 14627 - DNA, 26 bp, Homo sapiens
atttgtcgattctagtcaactgcctt

SEQ ID NO: 14628 - DNA, 26 bp, Homo sapiens
tttgtcgattctagtcaactgccttt

SEQ ID NO: 14629 - DNA, 26 bp, Homo sapiens
ttgtcgattctagtcaactgcctttg

SEQ ID NO: 14630 - DNA, 26 bp, Homo sapiens
tgtcgattctagtcaactgcctttga

SEQ ID NO: 14631 - DNA, 26 bp, Homo sapiens
gtcgattctagtcaactgcctttgac

SEQ ID NO: 14632 - DNA, 26 bp, Homo sapiens
tcgattctagtcaactgcctttgact

SEQ ID NO: 14633 - DNA, 26 bp, Homo sapiens
cgattctagtcaactgcctttgacta

SEQ ID NO: 14634 - DNA, 26 bp, Homo sapiens
gattctagtcaactgcctttgactac

SEQ ID NO: 14635 - DNA, 26 bp, Homo sapiens
attctagtcaactgcctttgactacc

SEQ ID NO: 14636 - DNA, 26 bp, Homo sapiens
ttctagtcaactgcctttgactacct

SEQ ID NO: 14637 - DNA, 26 bp, Homo sapiens
tctagtcaactgcctttgactacctg

SEQ ID NO: 14638 - DNA, 26 bp, Homo sapiens
ctagtcaactgcctttgactacctgg

SEQ ID NO: 14639 - DNA, 26 bp, Homo sapiens
tagtcaactgcctttgactacctggg

SEQ ID NO: 14640 - DNA, 26 bp, Homo sapiens
agtcaactgcctttgactacctgggt

SEQ ID NO: 14641 - DNA, 26 bp, Homo sapiens
gtcaactgcctttgactacctgggtc

SEQ ID NO: 14642 - DNA, 26 bp, Homo sapiens
tcaactgcctttgactacctgggtca

SEQ ID NO: 14643 - DNA, 26 bp, Homo sapiens
caactgcctttgactacctgggtcaa

SEQ ID NO: 14644 - DNA, 26 bp, Homo sapiens
aactgcctttgactacctgggtcaag

SEQ ID NO: 14645 - DNA, 26 bp, Homo sapiens
actgcctttgactacctgggtcaagc

SEQ ID NO: 14646 - DNA, 26 bp, Homo sapiens
ctgcctttgactacctgggtcaagca

SEQ ID NO: 14647 - DNA, 26 bp, Homo sapiens
tgcctttgactacctgggtcaagcaa

SEQ ID NO: 14648 - DNA, 26 bp, Homo sapiens
gcctttgactacctgggtcaagcaat

SEQ ID NO: 14649 - DNA, 26 bp, Homo sapiens
cctttgactacctgggtcaagcaatt

SEQ ID NO: 14650 - DNA, 26 bp, Homo sapiens
ctttgactacctgggtcaagcaattt

SEQ ID NO: 14651 - DNA, 26 bp, Homo sapiens
tttgactacctgggtcaagcaatttc

SEQ ID NO: 14652 - DNA, 26 bp, Homo sapiens
ttgactacctgggtcaagcaatttcc

SEQ ID NO: 14653 - DNA, 26 bp, Homo sapiens
tgactacctgggtcaagcaatttccc

SEQ ID NO: 14654 - DNA, 26 bp, Homo sapiens
gactacctgggtcaagcaatttccca

SEQ ID NO: 14655 - DNA, 26 bp, Homo sapiens
actacctgggtcaagcaatttcccac

SEQ ID NO: 14656 - DNA, 26 bp, Homo sapiens
ctacctgggtcaagcaatttcccacc

SEQ ID NO: 14657 - DNA, 26 bp, Homo sapiens
tacctgggtcaagcaatttcccacca

SEQ ID NO: 14658 - DNA, 26 bp, Homo sapiens
acctgggtcaagcaatttcccaccag

SEQ ID NO: 14659 - DNA, 26 bp, Homo sapiens
cctgggtcaagcaatttcccaccaga

SEQ ID NO: 14660 - DNA, 26 bp, Homo sapiens
ctgggtcaagcaatttcccaccagat

SEQ ID NO: 14661 - DNA, 26 bp, Homo sapiens
tgggtcaagcaatttcccaccagata

SEQ ID NO: 14662 - DNA, 26 bp, Homo sapiens
gggtcaagcaatttcccaccagataa

SEQ ID NO: 14663 - DNA, 26 bp, Homo sapiens
ggtcaagcaatttcccaccagataaa

SEQ ID NO: 14664 - DNA, 26 bp, Homo sapiens
gtcaagcaatttcccaccagataaaa

SEQ ID NO: 14665 - DNA, 26 bp, Homo sapiens
tcaagcaatttcccaccagataaaac

SEQ ID NO: 14666 - DNA, 26 bp, Homo sapiens
caagcaatttcccaccagataaaaca

SEQ ID NO: 14667 - DNA, 26 bp, Homo sapiens
aagcaatttcccaccagataaaacaa

SEQ ID NO: 14668 - DNA, 26 bp, Homo sapiens
agcaatttcccaccagataaaacaac

SEQ ID NO: 14669 - DNA, 26 bp, Homo sapiens
gcaatttcccaccagataaaacaact

SEQ ID NO: 14670 - DNA, 26 bp, Homo sapiens
caatttcccaccagataaaacaactt

SEQ ID NO: 14671 - DNA, 26 bp, Homo sapiens
aatttcccaccagataaaacaacttt

SEQ ID NO: 14672 - DNA, 26 bp, Homo sapiens
atttcccaccagataaaacaactttt

SEQ ID NO: 14673 - DNA, 26 bp, Homo sapiens
tttcccaccagataaaacaacttttc

SEQ ID NO: 14674 - DNA, 26 bp, Homo sapiens
ttcccaccagataaaacaacttttca

SEQ ID NO: 14675 - DNA, 26 bp, Homo sapiens
tcccaccagataaaacaacttttcaa

SEQ ID NO: 14676 - DNA, 26 bp, Homo sapiens
cccaccagataaaacaacttttcaaa

SEQ ID NO: 14677 - DNA, 26 bp, Homo sapiens
ccaccagataaaacaacttttcaaag

SEQ ID NO: 14678 - DNA, 26 bp, Homo sapiens
caccagataaaacaacttttcaaagc

SEQ ID NO: 14679 - DNA, 26 bp, Homo sapiens
accagataaaacaacttttcaaagcc

SEQ ID NO: 14680 - DNA, 26 bp, Homo sapiens
ccagataaaacaacttttcaaagcct

SEQ ID NO: 14681 - DNA, 26 bp, Homo sapiens
cagataaaacaacttttcaaagcctt

SEQ ID NO: 14682 - DNA, 26 bp, Homo sapiens
agataaaacaacttttcaaagccttc

SEQ ID NO: 14683 - DNA, 26 bp, Homo sapiens
gataaaacaacttttcaaagccttcc

SEQ ID NO: 14684 - DNA, 26 bp, Homo sapiens
ataaaacaacttttcaaagccttcct

SEQ ID NO: 14685 - DNA, 26 bp, Homo sapiens
taaaacaacttttcaaagccttcctt

SEQ ID NO: 14686 - DNA, 26 bp, Homo sapiens
aaaacaacttttcaaagccttccttc

SEQ ID NO: 14687 - DNA, 26 bp, Homo sapiens
aaacaacttttcaaagccttccttct

SEQ ID NO: 14688 - DNA, 26 bp, Homo sapiens
aacaacttttcaaagccttccttctg

SEQ ID NO: 14689 - DNA, 26 bp, Homo sapiens
acaacttttcaaagccttccttctgc

SEQ ID NO: 14690 - DNA, 26 bp, Homo sapiens
caacttttcaaagccttccttctgct

SEQ ID NO: 14691 - DNA, 26 bp, Homo sapiens
aacttttcaaagccttccttctgctt

SEQ ID NO: 14692 - DNA, 26 bp, Homo sapiens
acttttcaaagccttccttctgcttc

SEQ ID NO: 14693 - DNA, 26 bp, Homo sapiens
cttttcaaagccttccttctgcttcc

SEQ ID NO: 14694 - DNA, 26 bp, Homo sapiens
ttttcaaagccttccttctgcttccc

SEQ ID NO: 14695 - DNA, 26 bp, Homo sapiens
tttcaaagccttccttctgcttccct

SEQ ID NO: 14696 - DNA, 26 bp, Homo sapiens
ttcaaagccttccttctgcttccctt

SEQ ID NO: 14697 - DNA, 26 bp, Homo sapiens
tcaaagccttccttctgcttccctta

SEQ ID NO: 14698 - DNA, 26 bp, Homo sapiens
caaagccttccttctgcttcccttac

SEQ ID NO: 14699 - DNA, 26 bp, Homo sapiens
aaagccttccttctgcttcccttact

SEQ ID NO: 14700 - DNA, 26 bp, Homo sapiens
aagccttccttctgcttcccttactt

SEQ ID NO: 14701 - DNA, 26 bp, Homo sapiens
agccttccttctgcttcccttacttt

SEQ ID NO: 14702 - DNA, 26 bp, Homo sapiens
gccttccttctgcttcccttactttc

SEQ ID NO: 14703 - DNA, 26 bp, Homo sapiens
ccttccttctgcttcccttactttcc

SEQ ID NO: 14704 - DNA, 26 bp, Homo sapiens
cttccttctgcttcccttactttcca

SEQ ID NO: 14705 - DNA, 26 bp, Homo sapiens
ttccttctgcttcccttactttccag

SEQ ID NO: 14706 - DNA, 26 bp, Homo sapiens
tccttctgcttcccttactttccagc

SEQ ID NO: 14707 - DNA, 26 bp, Homo sapiens
ccttctgcttcccttactttccagcc

SEQ ID NO: 14708 - DNA, 26 bp, Homo sapiens
cttctgcttcccttactttccagcct

SEQ ID NO: 14709 - DNA, 26 bp, Homo sapiens
ttctgcttcccttactttccagcctg

SEQ ID NO: 14710 - DNA, 26 bp, Homo sapiens
tctgcttcccttactttccagcctgt

SEQ ID NO: 14711 - DNA, 26 bp, Homo sapiens
ctgcttcccttactttccagcctgta

SEQ ID NO: 14712 - DNA, 26 bp, Homo sapiens
tgcttcccttactttccagcctgtat

SEQ ID NO: 14713 - DNA, 26 bp, Homo sapiens
gcttcccttactttccagcctgtatc

SEQ ID NO: 14714 - DNA, 26 bp, Homo sapiens
cttcccttactttccagcctgtatcc

SEQ ID NO: 14715 - DNA, 26 bp, Homo sapiens
ttcccttactttccagcctgtatcct

SEQ ID NO: 14716 - DNA, 26 bp, Homo sapiens
tcccttactttccagcctgtatcctt

SEQ ID NO: 14717 - DNA, 26 bp, Homo sapiens
cccttactttccagcctgtatcctta

SEQ ID NO: 14718 - DNA, 26 bp, Homo sapiens
ccttactttccagcctgtatccttag

SEQ ID NO: 14719 - DNA, 26 bp, Homo sapiens
cttactttccagcctgtatccttagt

SEQ ID NO: 14720 - DNA, 26 bp, Homo sapiens
ttactttccagcctgtatccttagta

SEQ ID NO: 14721 - DNA, 26 bp, Homo sapiens
tactttccagcctgtatccttagtac

SEQ ID NO: 14722 - DNA, 26 bp, Homo sapiens
actttccagcctgtatccttagtacg

SEQ ID NO: 14723 - DNA, 26 bp, Homo sapiens
ctttccagcctgtatccttagtacgt

SEQ ID NO: 14724 - DNA, 26 bp, Homo sapiens
tttccagcctgtatccttagtacgta

SEQ ID NO: 14725 - DNA, 26 bp, Homo sapiens
ttccagcctgtatccttagtacgtaa

SEQ ID NO: 14726 - DNA, 26 bp, Homo sapiens
tccagcctgtatccttagtacgtaat

SEQ ID NO: 14727 - DNA, 26 bp, Homo sapiens
ccagcctgtatccttagtacgtaatt

SEQ ID NO: 14728 - DNA, 26 bp, Homo sapiens
cagcctgtatccttagtacgtaattt

SEQ ID NO: 14729 - DNA, 26 bp, Homo sapiens
agcctgtatccttagtacgtaatttg

SEQ ID NO: 14730 - DNA, 26 bp, Homo sapiens
gcctgtatccttagtacgtaatttgt

SEQ ID NO: 14731 - DNA, 26 bp, Homo sapiens
cctgtatccttagtacgtaatttgta

SEQ ID NO: 14732 - DNA, 26 bp, Homo sapiens
ctgtatccttagtacgtaatttgtaa

SEQ ID NO: 14733 - DNA, 26 bp, Homo sapiens
tgtatccttagtacgtaatttgtaaa

SEQ ID NO: 14734 - DNA, 26 bp, Homo sapiens
gtatccttagtacgtaatttgtaaac

SEQ ID NO: 14735 - DNA, 26 bp, Homo sapiens
tatccttagtacgtaatttgtaaaca

SEQ ID NO: 14736 - DNA, 26 bp, Homo sapiens
atccttagtacgtaatttgtaaacat

SEQ ID NO: 14737 - DNA, 26 bp, Homo sapiens
tccttagtacgtaatttgtaaacatt

SEQ ID NO: 14738 - DNA, 26 bp, Homo sapiens
ccttagtacgtaatttgtaaacattg

SEQ ID NO: 14739 - DNA, 26 bp, Homo sapiens
cttagtacgtaatttgtaaacattgt

SEQ ID NO: 14740 - DNA, 26 bp, Homo sapiens
ttagtacgtaatttgtaaacattgtc

SEQ ID NO: 14741 - DNA, 26 bp, Homo sapiens
tagtacgtaatttgtaaacattgtca

SEQ ID NO: 14742 - DNA, 26 bp, Homo sapiens
agtacgtaatttgtaaacattgtcac

SEQ ID NO: 14743 - DNA, 26 bp, Homo sapiens
gtacgtaatttgtaaacattgtcacg

SEQ ID NO: 14744 - DNA, 26 bp, Homo sapiens
tacgtaatttgtaaacattgtcacga

SEQ ID NO: 14745 - DNA, 26 bp, Homo sapiens
acgtaatttgtaaacattgtcacgaa

SEQ ID NO: 14746 - DNA, 26 bp, Homo sapiens
cgtaatttgtaaacattgtcacgaag

SEQ ID NO: 14747 - DNA, 26 bp, Homo sapiens
gtaatttgtaaacattgtcacgaagg

SEQ ID NO: 14748 - DNA, 26 bp, Homo sapiens
taatttgtaaacattgtcacgaaggg

SEQ ID NO: 14749 - DNA, 26 bp, Homo sapiens
aatttgtaaacattgtcacgaagggt

SEQ ID NO: 14750 - DNA, 26 bp, Homo sapiens
atttgtaaacattgtcacgaagggtc

SEQ ID NO: 14751 - DNA, 26 bp, Homo sapiens
tttgtaaacattgtcacgaagggtcc

SEQ ID NO: 14752 - DNA, 26 bp, Homo sapiens
ttgtaaacattgtcacgaagggtcct

SEQ ID NO: 14753 - DNA, 26 bp, Homo sapiens
tgtaaacattgtcacgaagggtcctg

SEQ ID NO: 14754 - DNA, 26 bp, Homo sapiens
gtaaacattgtcacgaagggtcctga

SEQ ID NO: 14755 - DNA, 26 bp, Homo sapiens
taaacattgtcacgaagggtcctgat

SEQ ID NO: 14756 - DNA, 26 bp, Homo sapiens
aaacattgtcacgaagggtcctgatg

SEQ ID NO: 14757 - DNA, 26 bp, Homo sapiens
aacattgtcacgaagggtcctgatgc

SEQ ID NO: 14758 - DNA, 26 bp, Homo sapiens
acattgtcacgaagggtcctgatgct

SEQ ID NO: 14759 - DNA, 26 bp, Homo sapiens
cattgtcacgaagggtcctgatgctt

SEQ ID NO: 14760 - DNA, 26 bp, Homo sapiens
attgtcacgaagggtcctgatgcttt

SEQ ID NO: 14761 - DNA, 26 bp, Homo sapiens
ttgtcacgaagggtcctgatgcttta

SEQ ID NO: 14762 - DNA, 26 bp, Homo sapiens
tgtcacgaagggtcctgatgctttaa

SEQ ID NO: 14763 - DNA, 26 bp, Homo sapiens
gtcacgaagggtcctgatgctttaat

SEQ ID NO: 14764 - DNA, 26 bp, Homo sapiens
tcacgaagggtcctgatgctttaata

SEQ ID NO: 14765 - DNA, 26 bp, Homo sapiens
cacgaagggtcctgatgctttaatat

SEQ ID NO: 14766 - DNA, 26 bp, Homo sapiens
acgaagggtcctgatgctttaatata

SEQ ID NO: 14767 - DNA, 26 bp, Homo sapiens
cgaagggtcctgatgctttaatatat

SEQ ID NO: 14768 - DNA, 26 bp, Homo sapiens
gaagggtcctgatgctttaatatatg

SEQ ID NO: 14769 - DNA, 26 bp, Homo sapiens
aagggtcctgatgctttaatatatgc

SEQ ID NO: 14770 - DNA, 26 bp, Homo sapiens
agggtcctgatgctttaatatatgca

SEQ ID NO: 14771 - DNA, 26 bp, Homo sapiens
gggtcctgatgctttaatatatgcag

SEQ ID NO: 14772 - DNA, 26 bp, Homo sapiens
ggtcctgatgctttaatatatgcaga

SEQ ID NO: 14773 - DNA, 26 bp, Homo sapiens
gtcctgatgctttaatatatgcagac

SEQ ID NO: 14774 - DNA, 26 bp, Homo sapiens
tcctgatgctttaatatatgcagact

SEQ ID NO: 14775 - DNA, 26 bp, Homo sapiens
cctgatgctttaatatatgcagacta

SEQ ID NO: 14776 - DNA, 26 bp, Homo sapiens
ctgatgctttaatatatgcagactaa

SEQ ID NO: 14777 - DNA, 26 bp, Homo sapiens
tgatgctttaatatatgcagactaaa

SEQ ID NO: 14778 - DNA, 26 bp, Homo sapiens
gatgctttaatatatgcagactaaaa

SEQ ID NO: 14779 - DNA, 26 bp, Homo sapiens
atgctttaatatatgcagactaaaag

SEQ ID NO: 14780 - DNA, 26 bp, Homo sapiens
tgctttaatatatgcagactaaaagg

SEQ ID NO: 14781 - DNA, 26 bp, Homo sapiens
gctttaatatatgcagactaaaagga

SEQ ID NO: 14782 - DNA, 26 bp, Homo sapiens
ctttaatatatgcagactaaaaggat

SEQ ID NO: 14783 - DNA, 26 bp, Homo sapiens
tttaatatatgcagactaaaaggata

SEQ ID NO: 14784 - DNA, 26 bp, Homo sapiens
ttaatatatgcagactaaaaggatat

SEQ ID NO: 14785 - DNA, 26 bp, Homo sapiens
taatatatgcagactaaaaggatatg

SEQ ID NO: 14786 - DNA, 26 bp, Homo sapiens
aatatatgcagactaaaaggatatgc

SEQ ID NO: 14787 - DNA, 26 bp, Homo sapiens
atatatgcagactaaaaggatatgca

SEQ ID NO: 14788 - DNA, 26 bp, Homo sapiens
tatatgcagactaaaaggatatgcaa

SEQ ID NO: 14789 - DNA, 26 bp, Homo sapiens
atatgcagactaaaaggatatgcaaa

SEQ ID NO: 14790 - DNA, 26 bp, Homo sapiens
tatgcagactaaaaggatatgcaaaa

SEQ ID NO: 14791 - DNA, 26 bp, Homo sapiens
atgcagactaaaaggatatgcaaaat

SEQ ID NO: 14792 - DNA, 26 bp, Homo sapiens
tgcagactaaaaggatatgcaaaatt

SEQ ID NO: 14793 - DNA, 26 bp, Homo sapiens
gcagactaaaaggatatgcaaaatta

SEQ ID NO: 14794 - DNA, 26 bp, Homo sapiens
cagactaaaaggatatgcaaaattaa

SEQ ID NO: 14795 - DNA, 26 bp, Homo sapiens
agactaaaaggatatgcaaaattaac

SEQ ID NO: 14796 - DNA, 26 bp, Homo sapiens
gactaaaaggatatgcaaaattaacc

SEQ ID NO: 14797 - DNA, 26 bp, Homo sapiens
actaaaaggatatgcaaaattaacca

SEQ ID NO: 14798 - DNA, 26 bp, Homo sapiens
ctaaaaggatatgcaaaattaaccac

SEQ ID NO: 14799 - DNA, 26 bp, Homo sapiens
taaaaggatatgcaaaattaaccaca

SEQ ID NO: 14800 - DNA, 26 bp, Homo sapiens
aaaaggatatgcaaaattaaccacat

SEQ ID NO: 14801 - DNA, 26 bp, Homo sapiens
aaaggatatgcaaaattaaccacatc

SEQ ID NO: 14802 - DNA, 26 bp, Homo sapiens
aaggatatgcaaaattaaccacatct

SEQ ID NO: 14803 - DNA, 26 bp, Homo sapiens
aggatatgcaaaattaaccacatcta

SEQ ID NO: 14804 - DNA, 26 bp, Homo sapiens
ggatatgcaaaattaaccacatctaa

SEQ ID NO: 14805 - DNA, 26 bp, Homo sapiens
gatatgcaaaattaaccacatctaaa

SEQ ID NO: 14806 - DNA, 26 bp, Homo sapiens
atatgcaaaattaaccacatctaaaa

SEQ ID NO: 14807 - DNA, 26 bp, Homo sapiens
tatgcaaaattaaccacatctaaaag

SEQ ID NO: 14808 - DNA, 26 bp, Homo sapiens
atgcaaaattaaccacatctaaaagt

SEQ ID NO: 14809 - DNA, 26 bp, Homo sapiens
tgcaaaattaaccacatctaaaagtg

SEQ ID NO: 14810 - DNA, 26 bp, Homo sapiens
gcaaaattaaccacatctaaaagtga

SEQ ID NO: 14811 - DNA, 26 bp, Homo sapiens
caaaattaaccacatctaaaagtgac

SEQ ID NO: 14812 - DNA, 26 bp, Homo sapiens
aaaattaaccacatctaaaagtgacc

SEQ ID NO: 14813 - DNA, 26 bp, Homo sapiens
aaattaaccacatctaaaagtgacca

SEQ ID NO: 14814 - DNA, 26 bp, Homo sapiens
aattaaccacatctaaaagtgaccaa

SEQ ID NO: 14815 - DNA, 26 bp, Homo sapiens
attaaccacatctaaaagtgaccaaa

SEQ ID NO: 14816 - DNA, 26 bp, Homo sapiens
ttaaccacatctaaaagtgaccaaag

SEQ ID NO: 14817 - DNA, 26 bp, Homo sapiens
taaccacatctaaaagtgaccaaagc

SEQ ID NO: 14818 - DNA, 26 bp, Homo sapiens
aaccacatctaaaagtgaccaaagca

SEQ ID NO: 14819 - DNA, 26 bp, Homo sapiens
accacatctaaaagtgaccaaagcaa

SEQ ID NO: 14820 - DNA, 26 bp, Homo sapiens
ccacatctaaaagtgaccaaagcaag

SEQ ID NO: 14821 - DNA, 26 bp, Homo sapiens
cacatctaaaagtgaccaaagcaagt

SEQ ID NO: 14822 - DNA, 26 bp, Homo sapiens
acatctaaaagtgaccaaagcaagtc

SEQ ID NO: 14823 - DNA, 26 bp, Homo sapiens
catctaaaagtgaccaaagcaagtct

SEQ ID NO: 14824 - DNA, 26 bp, Homo sapiens
atctaaaagtgaccaaagcaagtcta

SEQ ID NO: 14825 - DNA, 26 bp, Homo sapiens
tctaaaagtgaccaaagcaagtctac

SEQ ID NO: 14826 - DNA, 26 bp, Homo sapiens
ctaaaagtgaccaaagcaagtctact

SEQ ID NO: 14827 - DNA, 26 bp, Homo sapiens
taaaagtgaccaaagcaagtctactc

SEQ ID NO: 14828 - DNA, 26 bp, Homo sapiens
aaaagtgaccaaagcaagtctactcc

SEQ ID NO: 14829 - DNA, 26 bp, Homo sapiens
aaagtgaccaaagcaagtctactccc

SEQ ID NO: 14830 - DNA, 26 bp, Homo sapiens
aagtgaccaaagcaagtctactccct

SEQ ID NO: 14831 - DNA, 26 bp, Homo sapiens
agtgaccaaagcaagtctactccctt

SEQ ID NO: 14832 - DNA, 26 bp, Homo sapiens
gtgaccaaagcaagtctactcccttg

SEQ ID NO: 14833 - DNA, 26 bp, Homo sapiens
tgaccaaagcaagtctactcccttgt

SEQ ID NO: 14834 - DNA, 26 bp, Homo sapiens
gaccaaagcaagtctactcccttgta

SEQ ID NO: 14835 - DNA, 26 bp, Homo sapiens
accaaagcaagtctactcccttgtaa

SEQ ID NO: 14836 - DNA, 26 bp, Homo sapiens
ccaaagcaagtctactcccttgtaaa

SEQ ID NO: 14837 - DNA, 26 bp, Homo sapiens
caaagcaagtctactcccttgtaaaa

SEQ ID NO: 14838 - DNA, 26 bp, Homo sapiens
aaagcaagtctactcccttgtaaaat

SEQ ID NO: 14839 - DNA, 26 bp, Homo sapiens
aagcaagtctactcccttgtaaaatt

SEQ ID NO: 14840 - DNA, 26 bp, Homo sapiens
agcaagtctactcccttgtaaaatta

SEQ ID NO: 14841 - DNA, 26 bp, Homo sapiens
gcaagtctactcccttgtaaaattat

SEQ ID NO: 14842 - DNA, 26 bp, Homo sapiens
caagtctactcccttgtaaaattata

SEQ ID NO: 14843 - DNA, 26 bp, Homo sapiens
aagtctactcccttgtaaaattatag

SEQ ID NO: 14844 - DNA, 26 bp, Homo sapiens
agtctactcccttgtaaaattataga

SEQ ID NO: 14845 - DNA, 26 bp, Homo sapiens
gtctactcccttgtaaaattatagaa

SEQ ID NO: 14846 - DNA, 26 bp, Homo sapiens
tctactcccttgtaaaattatagaaa

SEQ ID NO: 14847 - DNA, 26 bp, Homo sapiens
ctactcccttgtaaaattatagaaag

SEQ ID NO: 14848 - DNA, 26 bp, Homo sapiens
tactcccttgtaaaattatagaaagg

SEQ ID NO: 14849 - DNA, 26 bp, Homo sapiens
actcccttgtaaaattatagaaaggt

SEQ ID NO: 14850 - DNA, 26 bp, Homo sapiens
ctcccttgtaaaattatagaaaggtt

SEQ ID NO: 14851 - DNA, 26 bp, Homo sapiens
tcccttgtaaaattatagaaaggttt

SEQ ID NO: 14852 - DNA, 26 bp, Homo sapiens
cccttgtaaaattatagaaaggtttg

SEQ ID NO: 14853 - DNA, 26 bp, Homo sapiens
ccttgtaaaattatagaaaggtttgc

SEQ ID NO: 14854 - DNA, 26 bp, Homo sapiens
cttgtaaaattatagaaaggtttgcc

SEQ ID NO: 14855 - DNA, 26 bp, Homo sapiens
ttgtaaaattatagaaaggtttgcct

SEQ ID NO: 14856 - DNA, 26 bp, Homo sapiens
tgtaaaattatagaaaggtttgcctt

SEQ ID NO: 14857 - DNA, 26 bp, Homo sapiens
gtaaaattatagaaaggtttgccttt

SEQ ID NO: 14858 - DNA, 26 bp, Homo sapiens
taaaattatagaaaggtttgcctttc

SEQ ID NO: 14859 - DNA, 26 bp, Homo sapiens
aaaattatagaaaggtttgcctttca

SEQ ID NO: 14860 - DNA, 26 bp, Homo sapiens
aaattatagaaaggtttgcctttcag

SEQ ID NO: 14861 - DNA, 26 bp, Homo sapiens
aattatagaaaggtttgcctttcagt

SEQ ID NO: 14862 - DNA, 26 bp, Homo sapiens
attatagaaaggtttgcctttcagta

SEQ ID NO: 14863 - DNA, 26 bp, Homo sapiens
ttatagaaaggtttgcctttcagtac

SEQ ID NO: 14864 - DNA, 26 bp, Homo sapiens
tatagaaaggtttgcctttcagtaca

SEQ ID NO: 14865 - DNA, 26 bp, Homo sapiens
atagaaaggtttgcctttcagtacat

SEQ ID NO: 14866 - DNA, 26 bp, Homo sapiens
tagaaaggtttgcctttcagtacatt

SEQ ID NO: 14867 - DNA, 26 bp, Homo sapiens
agaaaggtttgcctttcagtacatta

SEQ ID NO: 14868 - DNA, 26 bp, Homo sapiens
gaaaggtttgcctttcagtacattag

SEQ ID NO: 14869 - DNA, 26 bp, Homo sapiens
aaaggtttgcctttcagtacattaga

SEQ ID NO: 14870 - DNA, 26 bp, Homo sapiens
aaggtttgcctttcagtacattagat

SEQ ID NO: 14871 - DNA, 26 bp, Homo sapiens
aggtttgcctttcagtacattagatc

SEQ ID NO: 14872 - DNA, 26 bp, Homo sapiens
ggtttgcctttcagtacattagatct

SEQ ID NO: 14873 - DNA, 26 bp, Homo sapiens
gtttgcctttcagtacattagatctg

SEQ ID NO: 14874 - DNA, 26 bp, Homo sapiens
tttgcctttcagtacattagatctgc

SEQ ID NO: 14875 - DNA, 26 bp, Homo sapiens
ttgcctttcagtacattagatctgca

SEQ ID NO: 14876 - DNA, 26 bp, Homo sapiens
tgcctttcagtacattagatctgcag

SEQ ID NO: 14877 - DNA, 26 bp, Homo sapiens
gcctttcagtacattagatctgcagc

SEQ ID NO: 14878 - DNA, 26 bp, Homo sapiens
cctttcagtacattagatctgcagct

SEQ ID NO: 14879 - DNA, 26 bp, Homo sapiens
ctttcagtacattagatctgcagcta

SEQ ID NO: 14880 - DNA, 26 bp, Homo sapiens
tttcagtacattagatctgcagctac

SEQ ID NO: 14881 - DNA, 26 bp, Homo sapiens
ttcagtacattagatctgcagctaca

SEQ ID NO: 14882 - DNA, 26 bp, Homo sapiens
tcagtacattagatctgcagctacat

SEQ ID NO: 14883 - DNA, 26 bp, Homo sapiens
cagtacattagatctgcagctacatt

SEQ ID NO: 14884 - DNA, 26 bp, Homo sapiens
agtacattagatctgcagctacatta

SEQ ID NO: 14885 - DNA, 26 bp, Homo sapiens
gtacattagatctgcagctacattag

SEQ ID NO: 14886 - DNA, 26 bp, Homo sapiens
tacattagatctgcagctacattagt

SEQ ID NO: 14887 - DNA, 26 bp, Homo sapiens
acattagatctgcagctacattagtt

SEQ ID NO: 14888 - DNA, 26 bp, Homo sapiens
cattagatctgcagctacattagttg

SEQ ID NO: 14889 - DNA, 26 bp, Homo sapiens
attagatctgcagctacattagttgt

SEQ ID NO: 14890 - DNA, 26 bp, Homo sapiens
ttagatctgcagctacattagttgtt

SEQ ID NO: 14891 - DNA, 26 bp, Homo sapiens
tagatctgcagctacattagttgttt

SEQ ID NO: 14892 - DNA, 26 bp, Homo sapiens
agatctgcagctacattagttgtttc

SEQ ID NO: 14893 - DNA, 26 bp, Homo sapiens
gatctgcagctacattagttgtttct

SEQ ID NO: 14894 - DNA, 26 bp, Homo sapiens
atctgcagctacattagttgtttctg

SEQ ID NO: 14895 - DNA, 26 bp, Homo sapiens
tctgcagctacattagttgtttctgc

SEQ ID NO: 14896 - DNA, 26 bp, Homo sapiens
ctgcagctacattagttgtttctgcg

SEQ ID NO: 14897 - DNA, 26 bp, Homo sapiens
tgcagctacattagttgtttctgcgt

SEQ ID NO: 14898 - DNA, 26 bp, Homo sapiens
gcagctacattagttgtttctgcgtc

SEQ ID NO: 14899 - DNA, 26 bp, Homo sapiens
cagctacattagttgtttctgcgtct

SEQ ID NO: 14900 - DNA, 26 bp, Homo sapiens
agctacattagttgtttctgcgtctt

SEQ ID NO: 14901 - DNA, 26 bp, Homo sapiens
gctacattagttgtttctgcgtcttt

SEQ ID NO: 14902 - DNA, 26 bp, Homo sapiens
ctacattagttgtttctgcgtcttta

SEQ ID NO: 14903 - DNA, 26 bp, Homo sapiens
tacattagttgtttctgcgtctttag

SEQ ID NO: 14904 - DNA, 26 bp, Homo sapiens
acattagttgtttctgcgtctttaga

SEQ ID NO: 14905 - DNA, 26 bp, Homo sapiens
cattagttgtttctgcgtctttagat

SEQ ID NO: 14906 - DNA, 26 bp, Homo sapiens
attagttgtttctgcgtctttagatt

SEQ ID NO: 14907 - DNA, 26 bp, Homo sapiens
ttagttgtttctgcgtctttagattt

SEQ ID NO: 14908 - DNA, 26 bp, Homo sapiens
tagttgtttctgcgtctttagatttt

SEQ ID NO: 14909 - DNA, 26 bp, Homo sapiens
agttgtttctgcgtctttagattttg

SEQ ID NO: 14910 - DNA, 26 bp, Homo sapiens
gttgtttctgcgtctttagattttgc

SEQ ID NO: 14911 - DNA, 26 bp, Homo sapiens
ttgtttctgcgtctttagattttgca

SEQ ID NO: 14912 - DNA, 26 bp, Homo sapiens
tgtttctgcgtctttagattttgcaa

SEQ ID NO: 14913 - DNA, 26 bp, Homo sapiens
gtttctgcgtctttagattttgcaaa

SEQ ID NO: 14914 - DNA, 26 bp, Homo sapiens
tttctgcgtctttagattttgcaaaa

SEQ ID NO: 14915 - DNA, 26 bp, Homo sapiens
ttctgcgtctttagattttgcaaaag

SEQ ID NO: 14916 - DNA, 26 bp, Homo sapiens
tctgcgtctttagattttgcaaaagg

SEQ ID NO: 14917 - DNA, 26 bp, Homo sapiens
ctgcgtctttagattttgcaaaaggg

SEQ ID NO: 14918 - DNA, 26 bp, Homo sapiens
tgcgtctttagattttgcaaaaggga

SEQ ID NO: 14919 - DNA, 26 bp, Homo sapiens
gcgtctttagattttgcaaaagggaa

SEQ ID NO: 14920 - DNA, 26 bp, Homo sapiens
cgtctttagattttgcaaaagggaac

SEQ ID NO: 14921 - DNA, 26 bp, Homo sapiens
gtctttagattttgcaaaagggaact

SEQ ID NO: 14922 - DNA, 26 bp, Homo sapiens
tctttagattttgcaaaagggaactg

SEQ ID NO: 14923 - DNA, 26 bp, Homo sapiens
ctttagattttgcaaaagggaactga

SEQ ID NO: 14924 - DNA, 26 bp, Homo sapiens
tttagattttgcaaaagggaactgaa

SEQ ID NO: 14925 - DNA, 26 bp, Homo sapiens
ttagattttgcaaaagggaactgaaa

SEQ ID NO: 14926 - DNA, 26 bp, Homo sapiens
tagattttgcaaaagggaactgaaat

SEQ ID NO: 14927 - DNA, 26 bp, Homo sapiens
agattttgcaaaagggaactgaaatc

SEQ ID NO: 14928 - DNA, 26 bp, Homo sapiens
gattttgcaaaagggaactgaaatcc

SEQ ID NO: 14929 - DNA, 26 bp, Homo sapiens
attttgcaaaagggaactgaaatcca

SEQ ID NO: 14930 - DNA, 26 bp, Homo sapiens
ttttgcaaaagggaactgaaatccag

SEQ ID NO: 14931 - DNA, 26 bp, Homo sapiens
tttgcaaaagggaactgaaatccagc

SEQ ID NO: 14932 - DNA, 26 bp, Homo sapiens
ttgcaaaagggaactgaaatccagca

SEQ ID NO: 14933 - DNA, 26 bp, Homo sapiens
tgcaaaagggaactgaaatccagcaa

SEQ ID NO: 14934 - DNA, 26 bp, Homo sapiens
gcaaaagggaactgaaatccagcaag

SEQ ID NO: 14935 - DNA, 26 bp, Homo sapiens
caaaagggaactgaaatccagcaagt

SEQ ID NO: 14936 - DNA, 26 bp, Homo sapiens
aaaagggaactgaaatccagcaagtc

SEQ ID NO: 14937 - DNA, 26 bp, Homo sapiens
aaagggaactgaaatccagcaagtcg

SEQ ID NO: 14938 - DNA, 26 bp, Homo sapiens
aagggaactgaaatccagcaagtcgt

SEQ ID NO: 14939 - DNA, 26 bp, Homo sapiens
agggaactgaaatccagcaagtcgta

SEQ ID NO: 14940 - DNA, 26 bp, Homo sapiens
gggaactgaaatccagcaagtcgtat

SEQ ID NO: 14941 - DNA, 26 bp, Homo sapiens
ggaactgaaatccagcaagtcgtatt

SEQ ID NO: 14942 - DNA, 26 bp, Homo sapiens
gaactgaaatccagcaagtcgtatta

SEQ ID NO: 14943 - DNA, 26 bp, Homo sapiens
aactgaaatccagcaagtcgtattag

SEQ ID NO: 14944 - DNA, 26 bp, Homo sapiens
actgaaatccagcaagtcgtattagg

SEQ ID NO: 14945 - DNA, 26 bp, Homo sapiens
ctgaaatccagcaagtcgtattagga

SEQ ID NO: 14946 - DNA, 26 bp, Homo sapiens
tgaaatccagcaagtcgtattaggag

SEQ ID NO: 14947 - DNA, 26 bp, Homo sapiens
gaaatccagcaagtcgtattaggagc

SEQ ID NO: 14948 - DNA, 26 bp, Homo sapiens
aaatccagcaagtcgtattaggagcc

SEQ ID NO: 14949 - DNA, 26 bp, Homo sapiens
aatccagcaagtcgtattaggagccc

SEQ ID NO: 14950 - DNA, 26 bp, Homo sapiens
atccagcaagtcgtattaggagccca

SEQ ID NO: 14951 - DNA, 26 bp, Homo sapiens
tccagcaagtcgtattaggagcccat

SEQ ID NO: 14952 - DNA, 26 bp, Homo sapiens
ccagcaagtcgtattaggagcccatt

SEQ ID NO: 14953 - DNA, 26 bp, Homo sapiens
cagcaagtcgtattaggagcccattc

SEQ ID NO: 14954 - DNA, 26 bp, Homo sapiens
agcaagtcgtattaggagcccattca

SEQ ID NO: 14955 - DNA, 26 bp, Homo sapiens
gcaagtcgtattaggagcccattcag

SEQ ID NO: 14956 - DNA, 26 bp, Homo sapiens
caagtcgtattaggagcccattcaga

SEQ ID NO: 14957 - DNA, 26 bp, Homo sapiens
aagtcgtattaggagcccattcagaa

SEQ ID NO: 14958 - DNA, 26 bp, Homo sapiens
agtcgtattaggagcccattcagaaa

SEQ ID NO: 14959 - DNA, 26 bp, Homo sapiens
gtcgtattaggagcccattcagaaaa

SEQ ID NO: 14960 - DNA, 26 bp, Homo sapiens
tcgtattaggagcccattcagaaaat

SEQ ID NO: 14961 - DNA, 26 bp, Homo sapiens
cgtattaggagcccattcagaaaatg

SEQ ID NO: 14962 - DNA, 26 bp, Homo sapiens
gtattaggagcccattcagaaaatga

SEQ ID NO: 14963 - DNA, 26 bp, Homo sapiens
tattaggagcccattcagaaaatgaa

SEQ ID NO: 14964 - DNA, 26 bp, Homo sapiens
attaggagcccattcagaaaatgaac

SEQ ID NO: 14965 - DNA, 26 bp, Homo sapiens
ttaggagcccattcagaaaatgaaca

SEQ ID NO: 14966 - DNA, 26 bp, Homo sapiens
taggagcccattcagaaaatgaacaa

SEQ ID NO: 14967 - DNA, 26 bp, Homo sapiens
aggagcccattcagaaaatgaacaaa

SEQ ID NO: 14968 - DNA, 26 bp, Homo sapiens
ggagcccattcagaaaatgaacaaaa

SEQ ID NO: 14969 - DNA, 26 bp, Homo sapiens
gagcccattcagaaaatgaacaaaaa

SEQ ID NO: 14970 - DNA, 26 bp, Homo sapiens
agcccattcagaaaatgaacaaaaaa

SEQ ID NO: 14971 - DNA, 26 bp, Homo sapiens
gcccattcagaaaatgaacaaaaaag

SEQ ID NO: 14972 - DNA, 26 bp, Homo sapiens
cccattcagaaaatgaacaaaaaagc

SEQ ID NO: 14973 - DNA, 26 bp, Homo sapiens
ccattcagaaaatgaacaaaaaagca

SEQ ID NO: 14974 - DNA, 26 bp, Homo sapiens
cattcagaaaatgaacaaaaaagcaa

SEQ ID NO: 14975 - DNA, 26 bp, Homo sapiens
attcagaaaatgaacaaaaaagcaaa

SEQ ID NO: 14976 - DNA, 26 bp, Homo sapiens
ttcagaaaatgaacaaaaaagcaaaa

SEQ ID NO: 14977 - DNA, 26 bp, Homo sapiens
tcagaaaatgaacaaaaaagcaaaag

SEQ ID NO: 14978 - DNA, 26 bp, Homo sapiens
cagaaaatgaacaaaaaagcaaaaga

SEQ ID NO: 14979 - DNA, 26 bp, Homo sapiens
agaaaatgaacaaaaaagcaaaagaa

SEQ ID NO: 14980 - DNA, 26 bp, Homo sapiens
gaaaatgaacaaaaaagcaaaagaaa

SEQ ID NO: 14981 - DNA, 26 bp, Homo sapiens
aaaatgaacaaaaaagcaaaagaaaa

SEQ ID NO: 14982 - DNA, 26 bp, Homo sapiens
aaatgaacaaaaaagcaaaagaaaat

SEQ ID NO: 14983 - DNA, 26 bp, Homo sapiens
aatgaacaaaaaagcaaaagaaaatg

SEQ ID NO: 14984 - DNA, 26 bp, Homo sapiens
atgaacaaaaaagcaaaagaaaatga

SEQ ID NO: 14985 - DNA, 26 bp, Homo sapiens
tgaacaaaaaagcaaaagaaaatgac

SEQ ID NO: 14986 - DNA, 26 bp, Homo sapiens
gaacaaaaaagcaaaagaaaatgacc

SEQ ID NO: 14987 - DNA, 26 bp, Homo sapiens
aacaaaaaagcaaaagaaaatgaccc

SEQ ID NO: 14988 - DNA, 26 bp, Homo sapiens
acaaaaaagcaaaagaaaatgaccca

SEQ ID NO: 14989 - DNA, 26 bp, Homo sapiens
caaaaaagcaaaagaaaatgacccag

SEQ ID NO: 14990 - DNA, 26 bp, Homo sapiens
aaaaaagcaaaagaaaatgacccaga

SEQ ID NO: 14991 - DNA, 26 bp, Homo sapiens
aaaaagcaaaagaaaatgacccagaa

SEQ ID NO: 14992 - DNA, 26 bp, Homo sapiens
aaaagcaaaagaaaatgacccagaat

SEQ ID NO: 14993 - DNA, 26 bp, Homo sapiens
aaagcaaaagaaaatgacccagaatg

SEQ ID NO: 14994 - DNA, 26 bp, Homo sapiens
aagcaaaagaaaatgacccagaatga

SEQ ID NO: 14995 - DNA, 26 bp, Homo sapiens
agcaaaagaaaatgacccagaatgag

SEQ ID NO: 14996 - DNA, 26 bp, Homo sapiens
gcaaaagaaaatgacccagaatgagg

SEQ ID NO: 14997 - DNA, 26 bp, Homo sapiens
caaaagaaaatgacccagaatgaggt

SEQ ID NO: 14998 - DNA, 26 bp, Homo sapiens
aaaagaaaatgacccagaatgaggtg

SEQ ID NO: 14999 - DNA, 26 bp, Homo sapiens
aaagaaaatgacccagaatgaggtgg

SEQ ID NO: 15000 - DNA, 26 bp, Homo sapiens
aagaaaatgacccagaatgaggtggt

SEQ ID NO: 15001 - DNA, 26 bp, Homo sapiens
agaaaatgacccagaatgaggtggta

SEQ ID NO: 15002 - DNA, 26 bp, Homo sapiens
gaaaatgacccagaatgaggtggtat

SEQ ID NO: 15003 - DNA, 26 bp, Homo sapiens
aaaatgacccagaatgaggtggtata

SEQ ID NO: 15004 - DNA, 26 bp, Homo sapiens
aaatgacccagaatgaggtggtatat

SEQ ID NO: 15005 - DNA, 26 bp, Homo sapiens
aatgacccagaatgaggtggtatatt

SEQ ID NO: 15006 - DNA, 26 bp, Homo sapiens
atgacccagaatgaggtggtatattt

SEQ ID NO: 15007 - DNA, 26 bp, Homo sapiens
tgacccagaatgaggtggtatatttt

SEQ ID NO: 15008 - DNA, 26 bp, Homo sapiens
gacccagaatgaggtggtatattttt

SEQ ID NO: 15009 - DNA, 26 bp, Homo sapiens
acccagaatgaggtggtatatttttc

SEQ ID NO: 15010 - DNA, 26 bp, Homo sapiens
cccagaatgaggtggtatatttttca

SEQ ID NO: 15011 - DNA, 26 bp, Homo sapiens
ccagaatgaggtggtatatttttcac

SEQ ID NO: 15012 - DNA, 26 bp, Homo sapiens
cagaatgaggtggtatatttttcact

SEQ ID NO: 15013 - DNA, 26 bp, Homo sapiens
agaatgaggtggtatatttttcactt

SEQ ID NO: 15014 - DNA, 26 bp, Homo sapiens
gaatgaggtggtatatttttcacttt

SEQ ID NO: 15015 - DNA, 26 bp, Homo sapiens
aatgaggtggtatatttttcactttg

SEQ ID NO: 15016 - DNA, 26 bp, Homo sapiens
atgaggtggtatatttttcactttgc

SEQ ID NO: 15017 - DNA, 26 bp, Homo sapiens
tgaggtggtatatttttcactttgcg

SEQ ID NO: 15018 - DNA, 26 bp, Homo sapiens
gaggtggtatatttttcactttgcgt

SEQ ID NO: 15019 - DNA, 26 bp, Homo sapiens
aggtggtatatttttcactttgcgtt

SEQ ID NO: 15020 - DNA, 26 bp, Homo sapiens
ggtggtatatttttcactttgcgttt

SEQ ID NO: 15021 - DNA, 26 bp, Homo sapiens
gtggtatatttttcactttgcgtttt

SEQ ID NO: 15022 - DNA, 26 bp, Homo sapiens
tggtatatttttcactttgcgttttg

SEQ ID NO: 15023 - DNA, 26 bp, Homo sapiens
ggtatatttttcactttgcgttttgt

SEQ ID NO: 15024 - DNA, 26 bp, Homo sapiens
gtatatttttcactttgcgttttgta

SEQ ID NO: 15025 - DNA, 26 bp, Homo sapiens
tatatttttcactttgcgttttgtag

SEQ ID NO: 15026 - DNA, 26 bp, Homo sapiens
atatttttcactttgcgttttgtaga

SEQ ID NO: 15027 - DNA, 26 bp, Homo sapiens
tatttttcactttgcgttttgtagac

SEQ ID NO: 15028 - DNA, 26 bp, Homo sapiens
atttttcactttgcgttttgtagaca

SEQ ID NO: 15029 - DNA, 26 bp, Homo sapiens
tttttcactttgcgttttgtagacat

SEQ ID NO: 15030 - DNA, 26 bp, Homo sapiens
ttttcactttgcgttttgtagacata

SEQ ID NO: 15031 - DNA, 26 bp, Homo sapiens
tttcactttgcgttttgtagacataa

SEQ ID NO: 15032 - DNA, 26 bp, Homo sapiens
ttcactttgcgttttgtagacataag

SEQ ID NO: 15033 - DNA, 26 bp, Homo sapiens
tcactttgcgttttgtagacataagt

SEQ ID NO: 15034 - DNA, 26 bp, Homo sapiens
cactttgcgttttgtagacataagtc

SEQ ID NO: 15035 - DNA, 26 bp, Homo sapiens
actttgcgttttgtagacataagtcc

SEQ ID NO: 15036 - DNA, 26 bp, Homo sapiens
ctttgcgttttgtagacataagtccc

SEQ ID NO: 15037 - DNA, 26 bp, Homo sapiens
tttgcgttttgtagacataagtccct

SEQ ID NO: 15038 - DNA, 26 bp, Homo sapiens
ttgcgttttgtagacataagtccctt

SEQ ID NO: 15039 - DNA, 26 bp, Homo sapiens
tgcgttttgtagacataagtcccttc

SEQ ID NO: 15040 - DNA, 26 bp, Homo sapiens
gcgttttgtagacataagtcccttct

SEQ ID NO: 15041 - DNA, 26 bp, Homo sapiens
cgttttgtagacataagtcccttctt

SEQ ID NO: 15042 - DNA, 26 bp, Homo sapiens
gttttgtagacataagtcccttcttt

SEQ ID NO: 15043 - DNA, 26 bp, Homo sapiens
ttttgtagacataagtcccttcttta

SEQ ID NO: 15044 - DNA, 26 bp, Homo sapiens
tttgtagacataagtcccttctttat

SEQ ID NO: 15045 - DNA, 26 bp, Homo sapiens
ttgtagacataagtcccttctttata

SEQ ID NO: 15046 - DNA, 26 bp, Homo sapiens
tgtagacataagtcccttctttataa

SEQ ID NO: 15047 - DNA, 26 bp, Homo sapiens
gtagacataagtcccttctttataat

SEQ ID NO: 15048 - DNA, 26 bp, Homo sapiens
tagacataagtcccttctttataatt

SEQ ID NO: 15049 - DNA, 26 bp, Homo sapiens
agacataagtcccttctttataattt

SEQ ID NO: 15050 - DNA, 26 bp, Homo sapiens
gacataagtcccttctttataatttg

SEQ ID NO: 15051 - DNA, 26 bp, Homo sapiens
acataagtcccttctttataatttgc

SEQ ID NO: 15052 - DNA, 26 bp, Homo sapiens
cataagtcccttctttataatttgca

SEQ ID NO: 15053 - DNA, 26 bp, Homo sapiens
ataagtcccttctttataatttgcaa

SEQ ID NO: 15054 - DNA, 26 bp, Homo sapiens
taagtcccttctttataatttgcaat

SEQ ID NO: 15055 - DNA, 26 bp, Homo sapiens
aagtcccttctttataatttgcaatt

SEQ ID NO: 15056 - DNA, 26 bp, Homo sapiens
agtcccttctttataatttgcaattt

SEQ ID NO: 15057 - DNA, 26 bp, Homo sapiens
gtcccttctttataatttgcaatttt

SEQ ID NO: 15058 - DNA, 26 bp, Homo sapiens
tcccttctttataatttgcaattttt

SEQ ID NO: 15059 - DNA, 26 bp, Homo sapiens
cccttctttataatttgcaatttttt

SEQ ID NO: 15060 - DNA, 26 bp, Homo sapiens
ccttctttataatttgcaattttttc

SEQ ID NO: 15061 - DNA, 26 bp, Homo sapiens
cttctttataatttgcaattttttct

SEQ ID NO: 15062 - DNA, 26 bp, Homo sapiens
ttctttataatttgcaattttttctg

SEQ ID NO: 15063 - DNA, 26 bp, Homo sapiens
tctttataatttgcaattttttctga

SEQ ID NO: 15064 - DNA, 26 bp, Homo sapiens
ctttataatttgcaattttttctgag

SEQ ID NO: 15065 - DNA, 26 bp, Homo sapiens
tttataatttgcaattttttctgaga

SEQ ID NO: 15066 - DNA, 26 bp, Homo sapiens
ttataatttgcaattttttctgagag

SEQ ID NO: 15067 - DNA, 26 bp, Homo sapiens
tataatttgcaattttttctgagagg

SEQ ID NO: 15068 - DNA, 26 bp, Homo sapiens
ataatttgcaattttttctgagaggt

SEQ ID NO: 15069 - DNA, 26 bp, Homo sapiens
taatttgcaattttttctgagaggtg

SEQ ID NO: 15070 - DNA, 26 bp, Homo sapiens
aatttgcaattttttctgagaggtga

SEQ ID NO: 15071 - DNA, 26 bp, Homo sapiens
atttgcaattttttctgagaggtgat

SEQ ID NO: 15072 - DNA, 26 bp, Homo sapiens
tttgcaattttttctgagaggtgatg

SEQ ID NO: 15073 - DNA, 26 bp, Homo sapiens
ttgcaattttttctgagaggtgatgg

SEQ ID NO: 15074 - DNA, 26 bp, Homo sapiens
tgcaattttttctgagaggtgatgga

SEQ ID NO: 15075 - DNA, 26 bp, Homo sapiens
gcaattttttctgagaggtgatggat

SEQ ID NO: 15076 - DNA, 26 bp, Homo sapiens
caattttttctgagaggtgatggatt

SEQ ID NO: 15077 - DNA, 26 bp, Homo sapiens
aattttttctgagaggtgatggattt

SEQ ID NO: 15078 - DNA, 26 bp, Homo sapiens
attttttctgagaggtgatggatttt

SEQ ID NO: 15079 - DNA, 26 bp, Homo sapiens
ttttttctgagaggtgatggattttc

SEQ ID NO: 15080 - DNA, 26 bp, Homo sapiens
tttttctgagaggtgatggattttca

SEQ ID NO: 15081 - DNA, 26 bp, Homo sapiens
ttttctgagaggtgatggattttcac

SEQ ID NO: 15082 - DNA, 26 bp, Homo sapiens
tttctgagaggtgatggattttcact

SEQ ID NO: 15083 - DNA, 26 bp, Homo sapiens
ttctgagaggtgatggattttcactt

SEQ ID NO: 15084 - DNA, 26 bp, Homo sapiens
tctgagaggtgatggattttcacttc

SEQ ID NO: 15085 - DNA, 26 bp, Homo sapiens
ctgagaggtgatggattttcacttca

SEQ ID NO: 15086 - DNA, 26 bp, Homo sapiens
tgagaggtgatggattttcacttcag

SEQ ID NO: 15087 - DNA, 26 bp, Homo sapiens
gagaggtgatggattttcacttcaga

SEQ ID NO: 15088 - DNA, 26 bp, Homo sapiens
agaggtgatggattttcacttcagag

SEQ ID NO: 15089 - DNA, 26 bp, Homo sapiens
gaggtgatggattttcacttcagagg

SEQ ID NO: 15090 - DNA, 26 bp, Homo sapiens
aggtgatggattttcacttcagaggc

SEQ ID NO: 15091 - DNA, 26 bp, Homo sapiens
ggtgatggattttcacttcagaggca

SEQ ID NO: 15092 - DNA, 26 bp, Homo sapiens
gtgatggattttcacttcagaggcaa

SEQ ID NO: 15093 - DNA, 26 bp, Homo sapiens
tgatggattttcacttcagaggcaaa

SEQ ID NO: 15094 - DNA, 26 bp, Homo sapiens
gatggattttcacttcagaggcaaac

SEQ ID NO: 15095 - DNA, 26 bp, Homo sapiens
atggattttcacttcagaggcaaaca

SEQ ID NO: 15096 - DNA, 26 bp, Homo sapiens
tggattttcacttcagaggcaaacaa

SEQ ID NO: 15097 - DNA, 26 bp, Homo sapiens
ggattttcacttcagaggcaaacaat

SEQ ID NO: 15098 - DNA, 26 bp, Homo sapiens
gattttcacttcagaggcaaacaata

SEQ ID NO: 15099 - DNA, 26 bp, Homo sapiens
attttcacttcagaggcaaacaatat

SEQ ID NO: 15100 - DNA, 26 bp, Homo sapiens
ttttcacttcagaggcaaacaatatc

SEQ ID NO: 15101 - DNA, 26 bp, Homo sapiens
tttcacttcagaggcaaacaatatca

SEQ ID NO: 15102 - DNA, 26 bp, Homo sapiens
ttcacttcagaggcaaacaatatcat

SEQ ID NO: 15103 - DNA, 26 bp, Homo sapiens
tcacttcagaggcaaacaatatcatg

SEQ ID NO: 15104 - DNA, 26 bp, Homo sapiens
cacttcagaggcaaacaatatcatga

SEQ ID NO: 15105 - DNA, 26 bp, Homo sapiens
acttcagaggcaaacaatatcatgac

SEQ ID NO: 15106 - DNA, 26 bp, Homo sapiens
cttcagaggcaaacaatatcatgaca

SEQ ID NO: 15107 - DNA, 26 bp, Homo sapiens
ttcagaggcaaacaatatcatgacaa

SEQ ID NO: 15108 - DNA, 26 bp, Homo sapiens
tcagaggcaaacaatatcatgacaag

SEQ ID NO: 15109 - DNA, 26 bp, Homo sapiens
cagaggcaaacaatatcatgacaaga

SEQ ID NO: 15110 - DNA, 26 bp, Homo sapiens
agaggcaaacaatatcatgacaagac

SEQ ID NO: 15111 - DNA, 26 bp, Homo sapiens
gaggcaaacaatatcatgacaagaca

SEQ ID NO: 15112 - DNA, 26 bp, Homo sapiens
aggcaaacaatatcatgacaagacag

SEQ ID NO: 15113 - DNA, 26 bp, Homo sapiens
ggcaaacaatatcatgacaagacagc

SEQ ID NO: 15114 - DNA, 26 bp, Homo sapiens
gcaaacaatatcatgacaagacagcc

SEQ ID NO: 15115 - DNA, 26 bp, Homo sapiens
caaacaatatcatgacaagacagcca

SEQ ID NO: 15116 - DNA, 26 bp, Homo sapiens
aaacaatatcatgacaagacagccac

SEQ ID NO: 15117 - DNA, 26 bp, Homo sapiens
aacaatatcatgacaagacagccaca

SEQ ID NO: 15118 - DNA, 26 bp, Homo sapiens
acaatatcatgacaagacagccacag

SEQ ID NO: 15119 - DNA, 26 bp, Homo sapiens
caatatcatgacaagacagccacagg

SEQ ID NO: 15120 - DNA, 26 bp, Homo sapiens
aatatcatgacaagacagccacagga

SEQ ID NO: 15121 - DNA, 26 bp, Homo sapiens
atatcatgacaagacagccacaggag

SEQ ID NO: 15122 - DNA, 26 bp, Homo sapiens
tatcatgacaagacagccacaggagc

SEQ ID NO: 15123 - DNA, 26 bp, Homo sapiens
atcatgacaagacagccacaggagcc

SEQ ID NO: 15124 - DNA, 26 bp, Homo sapiens
tcatgacaagacagccacaggagcct

SEQ ID NO: 15125 - DNA, 26 bp, Homo sapiens
catgacaagacagccacaggagcctg

SEQ ID NO: 15126 - DNA, 26 bp, Homo sapiens
atgacaagacagccacaggagcctga

SEQ ID NO: 15127 - DNA, 26 bp, Homo sapiens
tgacaagacagccacaggagcctgaa

SEQ ID NO: 15128 - DNA, 26 bp, Homo sapiens
gacaagacagccacaggagcctgaaa

SEQ ID NO: 15129 - DNA, 26 bp, Homo sapiens
acaagacagccacaggagcctgaaat

SEQ ID NO: 15130 - DNA, 26 bp, Homo sapiens
caagacagccacaggagcctgaaatg

SEQ ID NO: 15131 - DNA, 26 bp, Homo sapiens
aagacagccacaggagcctgaaatga

SEQ ID NO: 15132 - DNA, 26 bp, Homo sapiens
agacagccacaggagcctgaaatgaa

SEQ ID NO: 15133 - DNA, 26 bp, Homo sapiens
gacagccacaggagcctgaaatgaag

SEQ ID NO: 15134 - DNA, 26 bp, Homo sapiens
acagccacaggagcctgaaatgaagc

SEQ ID NO: 15135 - DNA, 26 bp, Homo sapiens
cagccacaggagcctgaaatgaagct

SEQ ID NO: 15136 - DNA, 26 bp, Homo sapiens
agccacaggagcctgaaatgaagctc

SEQ ID NO: 15137 - DNA, 26 bp, Homo sapiens
gccacaggagcctgaaatgaagctca

SEQ ID NO: 15138 - DNA, 26 bp, Homo sapiens
ccacaggagcctgaaatgaagctcaa

SEQ ID NO: 15139 - DNA, 26 bp, Homo sapiens
cacaggagcctgaaatgaagctcaaa

SEQ ID NO: 15140 - DNA, 26 bp, Homo sapiens
acaggagcctgaaatgaagctcaaaa

SEQ ID NO: 15141 - DNA, 26 bp, Homo sapiens
caggagcctgaaatgaagctcaaaag

SEQ ID NO: 15142 - DNA, 26 bp, Homo sapiens
aggagcctgaaatgaagctcaaaagg

SEQ ID NO: 15143 - DNA, 26 bp, Homo sapiens
ggagcctgaaatgaagctcaaaaggt

SEQ ID NO: 15144 - DNA, 26 bp, Homo sapiens
gagcctgaaatgaagctcaaaaggta

SEQ ID NO: 15145 - DNA, 26 bp, Homo sapiens
agcctgaaatgaagctcaaaaggtac

SEQ ID NO: 15146 - DNA, 26 bp, Homo sapiens
gcctgaaatgaagctcaaaaggtaca

SEQ ID NO: 15147 - DNA, 26 bp, Homo sapiens
cctgaaatgaagctcaaaaggtacag

SEQ ID NO: 15148 - DNA, 26 bp, Homo sapiens
ctgaaatgaagctcaaaaggtacagc

SEQ ID NO: 15149 - DNA, 26 bp, Homo sapiens
tgaaatgaagctcaaaaggtacagcc

SEQ ID NO: 15150 - DNA, 26 bp, Homo sapiens
gaaatgaagctcaaaaggtacagccc

SEQ ID NO: 15151 - DNA, 26 bp, Homo sapiens
aaatgaagctcaaaaggtacagccct

SEQ ID NO: 15152 - DNA, 26 bp, Homo sapiens
aatgaagctcaaaaggtacagcccta

SEQ ID NO: 15153 - DNA, 26 bp, Homo sapiens
atgaagctcaaaaggtacagccctag

SEQ ID NO: 15154 - DNA, 26 bp, Homo sapiens
tgaagctcaaaaggtacagccctagg

SEQ ID NO: 15155 - DNA, 26 bp, Homo sapiens
gaagctcaaaaggtacagccctaggg

SEQ ID NO: 15156 - DNA, 26 bp, Homo sapiens
aagctcaaaaggtacagccctagggg

SEQ ID NO: 15157 - DNA, 26 bp, Homo sapiens
agctcaaaaggtacagccctagggga

SEQ ID NO: 15158 - DNA, 26 bp, Homo sapiens
gctcaaaaggtacagccctaggggac

SEQ ID NO: 15159 - DNA, 26 bp, Homo sapiens
ctcaaaaggtacagccctaggggacc

SEQ ID NO: 15160 - DNA, 26 bp, Homo sapiens
tcaaaaggtacagccctaggggacca

SEQ ID NO: 15161 - DNA, 26 bp, Homo sapiens
caaaaggtacagccctaggggaccat

SEQ ID NO: 15162 - DNA, 26 bp, Homo sapiens
aaaaggtacagccctaggggaccatg

SEQ ID NO: 15163 - DNA, 26 bp, Homo sapiens
aaaggtacagccctaggggaccatgc

SEQ ID NO: 15164 - DNA, 26 bp, Homo sapiens
aaggtacagccctaggggaccatgca

SEQ ID NO: 15165 - DNA, 26 bp, Homo sapiens
aggtacagccctaggggaccatgcag

SEQ ID NO: 15166 - DNA, 26 bp, Homo sapiens
ggtacagccctaggggaccatgcaga

SEQ ID NO: 15167 - DNA, 26 bp, Homo sapiens
gtacagccctaggggaccatgcagag

SEQ ID NO: 15168 - DNA, 26 bp, Homo sapiens
tacagccctaggggaccatgcagagt

SEQ ID NO: 15169 - DNA, 26 bp, Homo sapiens
acagccctaggggaccatgcagagtt

SEQ ID NO: 15170 - DNA, 26 bp, Homo sapiens
cagccctaggggaccatgcagagttt

SEQ ID NO: 15171 - DNA, 26 bp, Homo sapiens
agccctaggggaccatgcagagtttc

SEQ ID NO: 15172 - DNA, 26 bp, Homo sapiens
gccctaggggaccatgcagagtttca

SEQ ID NO: 15173 - DNA, 26 bp, Homo sapiens
ccctaggggaccatgcagagtttcaa

SEQ ID NO: 15174 - DNA, 26 bp, Homo sapiens
cctaggggaccatgcagagtttcaaa

SEQ ID NO: 15175 - DNA, 26 bp, Homo sapiens
ctaggggaccatgcagagtttcaaaa

SEQ ID NO: 15176 - DNA, 26 bp, Homo sapiens
taggggaccatgcagagtttcaaaag

SEQ ID NO: 15177 - DNA, 26 bp, Homo sapiens
aggggaccatgcagagtttcaaaagg

SEQ ID NO: 15178 - DNA, 26 bp, Homo sapiens
ggggaccatgcagagtttcaaaaggt

SEQ ID NO: 15179 - DNA, 26 bp, Homo sapiens
gggaccatgcagagtttcaaaaggtt

SEQ ID NO: 15180 - DNA, 26 bp, Homo sapiens
ggaccatgcagagtttcaaaaggttt

SEQ ID NO: 15181 - DNA, 26 bp, Homo sapiens
gaccatgcagagtttcaaaaggtttt

SEQ ID NO: 15182 - DNA, 26 bp, Homo sapiens
accatgcagagtttcaaaaggttttc

SEQ ID NO: 15183 - DNA, 26 bp, Homo sapiens
ccatgcagagtttcaaaaggttttcc

SEQ ID NO: 15184 - DNA, 26 bp, Homo sapiens
catgcagagtttcaaaaggttttcca

SEQ ID NO: 15185 - DNA, 26 bp, Homo sapiens
atgcagagtttcaaaaggttttccaa

SEQ ID NO: 15186 - DNA, 26 bp, Homo sapiens
tgcagagtttcaaaaggttttccaaa

SEQ ID NO: 15187 - DNA, 26 bp, Homo sapiens
gcagagtttcaaaaggttttccaaaa

SEQ ID NO: 15188 - DNA, 26 bp, Homo sapiens
cagagtttcaaaaggttttccaaaag

SEQ ID NO: 15189 - DNA, 26 bp, Homo sapiens
agagtttcaaaaggttttccaaaagc

SEQ ID NO: 15190 - DNA, 26 bp, Homo sapiens
gagtttcaaaaggttttccaaaagca

SEQ ID NO: 15191 - DNA, 26 bp, Homo sapiens
agtttcaaaaggttttccaaaagcat

SEQ ID NO: 15192 - DNA, 26 bp, Homo sapiens
gtttcaaaaggttttccaaaagcatt

SEQ ID NO: 15193 - DNA, 26 bp, Homo sapiens
tttcaaaaggttttccaaaagcattg

SEQ ID NO: 15194 - DNA, 26 bp, Homo sapiens
ttcaaaaggttttccaaaagcattgt

SEQ ID NO: 15195 - DNA, 26 bp, Homo sapiens
tcaaaaggttttccaaaagcattgta

SEQ ID NO: 15196 - DNA, 26 bp, Homo sapiens
caaaaggttttccaaaagcattgtac

SEQ ID NO: 15197 - DNA, 26 bp, Homo sapiens
aaaaggttttccaaaagcattgtaca

SEQ ID NO: 15198 - DNA, 26 bp, Homo sapiens
aaaggttttccaaaagcattgtacat

SEQ ID NO: 15199 - DNA, 26 bp, Homo sapiens
aaggttttccaaaagcattgtacatg

SEQ ID NO: 15200 - DNA, 26 bp, Homo sapiens
aggttttccaaaagcattgtacatga

SEQ ID NO: 15201 - DNA, 26 bp, Homo sapiens
ggttttccaaaagcattgtacatgaa

SEQ ID NO: 15202 - DNA, 26 bp, Homo sapiens
gttttccaaaagcattgtacatgaag

SEQ ID NO: 15203 - DNA, 26 bp, Homo sapiens
ttttccaaaagcattgtacatgaaga

SEQ ID NO: 15204 - DNA, 26 bp, Homo sapiens
tttccaaaagcattgtacatgaagaa

SEQ ID NO: 15205 - DNA, 26 bp, Homo sapiens
ttccaaaagcattgtacatgaagaag

SEQ ID NO: 15206 - DNA, 26 bp, Homo sapiens
tccaaaagcattgtacatgaagaagg

SEQ ID NO: 15207 - DNA, 26 bp, Homo sapiens
ccaaaagcattgtacatgaagaaggc

SEQ ID NO: 15208 - DNA, 26 bp, Homo sapiens
caaaagcattgtacatgaagaaggct

SEQ ID NO: 15209 - DNA, 26 bp, Homo sapiens
aaaagcattgtacatgaagaaggctg

SEQ ID NO: 15210 - DNA, 26 bp, Homo sapiens
aaagcattgtacatgaagaaggctgt

SEQ ID NO: 15211 - DNA, 26 bp, Homo sapiens
aagcattgtacatgaagaaggctgtc

SEQ ID NO: 15212 - DNA, 26 bp, Homo sapiens
agcattgtacatgaagaaggctgtcc

SEQ ID NO: 15213 - DNA, 26 bp, Homo sapiens
gcattgtacatgaagaaggctgtccc

SEQ ID NO: 15214 - DNA, 26 bp, Homo sapiens
cattgtacatgaagaaggctgtcccc

SEQ ID NO: 15215 - DNA, 26 bp, Homo sapiens
attgtacatgaagaaggctgtcccca

SEQ ID NO: 15216 - DNA, 26 bp, Homo sapiens
ttgtacatgaagaaggctgtccccac

SEQ ID NO: 15217 - DNA, 26 bp, Homo sapiens
tgtacatgaagaaggctgtccccacc

SEQ ID NO: 15218 - DNA, 26 bp, Homo sapiens
gtacatgaagaaggctgtccccacca

SEQ ID NO: 15219 - DNA, 26 bp, Homo sapiens
tacatgaagaaggctgtccccaccat

SEQ ID NO: 15220 - DNA, 26 bp, Homo sapiens
acatgaagaaggctgtccccaccatg

SEQ ID NO: 15221 - DNA, 26 bp, Homo sapiens
catgaagaaggctgtccccaccatgg

SEQ ID NO: 15222 - DNA, 26 bp, Homo sapiens
atgaagaaggctgtccccaccatggt

SEQ ID NO: 15223 - DNA, 26 bp, Homo sapiens
tgaagaaggctgtccccaccatggtt

SEQ ID NO: 15224 - DNA, 26 bp, Homo sapiens
gaagaaggctgtccccaccatggtta

SEQ ID NO: 15225 - DNA, 26 bp, Homo sapiens
aagaaggctgtccccaccatggttaa

SEQ ID NO: 15226 - DNA, 26 bp, Homo sapiens
agaaggctgtccccaccatggttaac

SEQ ID NO: 15227 - DNA, 26 bp, Homo sapiens
gaaggctgtccccaccatggttaaca

SEQ ID NO: 15228 - DNA, 26 bp, Homo sapiens
aaggctgtccccaccatggttaacac

SEQ ID NO: 15229 - DNA, 26 bp, Homo sapiens
aggctgtccccaccatggttaacaca

SEQ ID NO: 15230 - DNA, 26 bp, Homo sapiens
ggctgtccccaccatggttaacacaa

SEQ ID NO: 15231 - DNA, 26 bp, Homo sapiens
gctgtccccaccatggttaacacaat

SEQ ID NO: 15232 - DNA, 26 bp, Homo sapiens
ctgtccccaccatggttaacacaata

SEQ ID NO: 15233 - DNA, 26 bp, Homo sapiens
tgtccccaccatggttaacacaataa

SEQ ID NO: 15234 - DNA, 26 bp, Homo sapiens
gtccccaccatggttaacacaataag

SEQ ID NO: 15235 - DNA, 26 bp, Homo sapiens
tccccaccatggttaacacaataagg

SEQ ID NO: 15236 - DNA, 26 bp, Homo sapiens
ccccaccatggttaacacaataagga

SEQ ID NO: 15237 - DNA, 26 bp, Homo sapiens
cccaccatggttaacacaataaggat

SEQ ID NO: 15238 - DNA, 26 bp, Homo sapiens
ccaccatggttaacacaataaggatg

SEQ ID NO: 15239 - DNA, 26 bp, Homo sapiens
caccatggttaacacaataaggatgg

SEQ ID NO: 15240 - DNA, 26 bp, Homo sapiens
accatggttaacacaataaggatggc

SEQ ID NO: 15241 - DNA, 26 bp, Homo sapiens
ccatggttaacacaataaggatggca

SEQ ID NO: 15242 - DNA, 26 bp, Homo sapiens
catggttaacacaataaggatggcag

SEQ ID NO: 15243 - DNA, 26 bp, Homo sapiens
atggttaacacaataaggatggcaga

SEQ ID NO: 15244 - DNA, 26 bp, Homo sapiens
tggttaacacaataaggatggcagag

SEQ ID NO: 15245 - DNA, 26 bp, Homo sapiens
ggttaacacaataaggatggcagaga

SEQ ID NO: 15246 - DNA, 26 bp, Homo sapiens
gttaacacaataaggatggcagagaa

SEQ ID NO: 15247 - DNA, 26 bp, Homo sapiens
ttaacacaataaggatggcagagaag

SEQ ID NO: 15248 - DNA, 26 bp, Homo sapiens
taacacaataaggatggcagagaaga

SEQ ID NO: 15249 - DNA, 26 bp, Homo sapiens
aacacaataaggatggcagagaagag

SEQ ID NO: 15250 - DNA, 26 bp, Homo sapiens
acacaataaggatggcagagaagaga

SEQ ID NO: 15251 - DNA, 26 bp, Homo sapiens
cacaataaggatggcagagaagagaa

SEQ ID NO: 15252 - DNA, 26 bp, Homo sapiens
acaataaggatggcagagaagagaat

SEQ ID NO: 15253 - DNA, 26 bp, Homo sapiens
caataaggatggcagagaagagaatg

SEQ ID NO: 15254 - DNA, 26 bp, Homo sapiens
aataaggatggcagagaagagaatga

SEQ ID NO: 15255 - DNA, 26 bp, Homo sapiens
ataaggatggcagagaagagaatgac

SEQ ID NO: 15256 - DNA, 26 bp, Homo sapiens
taaggatggcagagaagagaatgaca

SEQ ID NO: 15257 - DNA, 26 bp, Homo sapiens
aaggatggcagagaagagaatgacat

SEQ ID NO: 15258 - DNA, 26 bp, Homo sapiens
aggatggcagagaagagaatgacatt

SEQ ID NO: 15259 - DNA, 26 bp, Homo sapiens
ggatggcagagaagagaatgacattg

SEQ ID NO: 15260 - DNA, 26 bp, Homo sapiens
gatggcagagaagagaatgacattga

SEQ ID NO: 15261 - DNA, 26 bp, Homo sapiens
atggcagagaagagaatgacattgac

SEQ ID NO: 15262 - DNA, 26 bp, Homo sapiens
tggcagagaagagaatgacattgacg

SEQ ID NO: 15263 - DNA, 26 bp, Homo sapiens
ggcagagaagagaatgacattgacgt

SEQ ID NO: 15264 - DNA, 26 bp, Homo sapiens
gcagagaagagaatgacattgacgtg

SEQ ID NO: 15265 - DNA, 26 bp, Homo sapiens
cagagaagagaatgacattgacgtgg

SEQ ID NO: 15266 - DNA, 26 bp, Homo sapiens
agagaagagaatgacattgacgtgga

SEQ ID NO: 15267 - DNA, 26 bp, Homo sapiens
gagaagagaatgacattgacgtggat

SEQ ID NO: 15268 - DNA, 26 bp, Homo sapiens
agaagagaatgacattgacgtggatg

SEQ ID NO: 15269 - DNA, 26 bp, Homo sapiens
gaagagaatgacattgacgtggatgc

SEQ ID NO: 15270 - DNA, 26 bp, Homo sapiens
aagagaatgacattgacgtggatgct

SEQ ID NO: 15271 - DNA, 26 bp, Homo sapiens
agagaatgacattgacgtggatgctc

SEQ ID NO: 15272 - DNA, 26 bp, Homo sapiens
gagaatgacattgacgtggatgctca

SEQ ID NO: 15273 - DNA, 26 bp, Homo sapiens
agaatgacattgacgtggatgctcac

SEQ ID NO: 15274 - DNA, 26 bp, Homo sapiens
gaatgacattgacgtggatgctcact

SEQ ID NO: 15275 - DNA, 26 bp, Homo sapiens
aatgacattgacgtggatgctcactg

SEQ ID NO: 15276 - DNA, 26 bp, Homo sapiens
atgacattgacgtggatgctcactgg

SEQ ID NO: 15277 - DNA, 26 bp, Homo sapiens
tgacattgacgtggatgctcactggg

SEQ ID NO: 15278 - DNA, 26 bp, Homo sapiens
gacattgacgtggatgctcactggga

SEQ ID NO: 15279 - DNA, 26 bp, Homo sapiens
acattgacgtggatgctcactgggat

SEQ ID NO: 15280 - DNA, 26 bp, Homo sapiens
cattgacgtggatgctcactgggatt

SEQ ID NO: 15281 - DNA, 26 bp, Homo sapiens
attgacgtggatgctcactgggattg

SEQ ID NO: 15282 - DNA, 26 bp, Homo sapiens
ttgacgtggatgctcactgggattgc

SEQ ID NO: 15283 - DNA, 26 bp, Homo sapiens
tgacgtggatgctcactgggattgct

SEQ ID NO: 15284 - DNA, 26 bp, Homo sapiens
gacgtggatgctcactgggattgctt

SEQ ID NO: 15285 - DNA, 26 bp, Homo sapiens
acgtggatgctcactgggattgcttt

SEQ ID NO: 15286 - DNA, 26 bp, Homo sapiens
cgtggatgctcactgggattgctttg

SEQ ID NO: 15287 - DNA, 26 bp, Homo sapiens
gtggatgctcactgggattgctttga

SEQ ID NO: 15288 - DNA, 26 bp, Homo sapiens
tggatgctcactgggattgctttgag

SEQ ID NO: 15289 - DNA, 26 bp, Homo sapiens
ggatgctcactgggattgctttgagc

SEQ ID NO: 15290 - DNA, 26 bp, Homo sapiens
gatgctcactgggattgctttgagca

SEQ ID NO: 15291 - DNA, 26 bp, Homo sapiens
atgctcactgggattgctttgagcaa

SEQ ID NO: 15292 - DNA, 26 bp, Homo sapiens
tgctcactgggattgctttgagcaaa

SEQ ID NO: 15293 - DNA, 26 bp, Homo sapiens
gctcactgggattgctttgagcaaat

SEQ ID NO: 15294 - DNA, 26 bp, Homo sapiens
ctcactgggattgctttgagcaaatc

SEQ ID NO: 15295 - DNA, 26 bp, Homo sapiens
tcactgggattgctttgagcaaatct

SEQ ID NO: 15296 - DNA, 26 bp, Homo sapiens
cactgggattgctttgagcaaatctg

SEQ ID NO: 15297 - DNA, 26 bp, Homo sapiens
actgggattgctttgagcaaatctgg

SEQ ID NO: 15298 - DNA, 26 bp, Homo sapiens
ctgggattgctttgagcaaatctgga

SEQ ID NO: 15299 - DNA, 26 bp, Homo sapiens
tgggattgctttgagcaaatctggaa

SEQ ID NO: 15300 - DNA, 26 bp, Homo sapiens
gggattgctttgagcaaatctggaaa

SEQ ID NO: 15301 - DNA, 26 bp, Homo sapiens
ggattgctttgagcaaatctggaaaa

SEQ ID NO: 15302 - DNA, 26 bp, Homo sapiens
gattgctttgagcaaatctggaaaaa

SEQ ID NO: 15303 - DNA, 26 bp, Homo sapiens
attgctttgagcaaatctggaaaaaa

SEQ ID NO: 15304 - DNA, 26 bp, Homo sapiens
ttgctttgagcaaatctggaaaaaat

SEQ ID NO: 15305 - DNA, 26 bp, Homo sapiens
tgctttgagcaaatctggaaaaaatg

SEQ ID NO: 15306 - DNA, 26 bp, Homo sapiens
gctttgagcaaatctggaaaaaatga

SEQ ID NO: 15307 - DNA, 26 bp, Homo sapiens
ctttgagcaaatctggaaaaaatgag

SEQ ID NO: 15308 - DNA, 26 bp, Homo sapiens
tttgagcaaatctggaaaaaatgaga

SEQ ID NO: 15309 - DNA, 26 bp, Homo sapiens
ttgagcaaatctggaaaaaatgagaa

SEQ ID NO: 15310 - DNA, 26 bp, Homo sapiens
tgagcaaatctggaaaaaatgagaac

SEQ ID NO: 15311 - DNA, 26 bp, Homo sapiens
gagcaaatctggaaaaaatgagaacc

SEQ ID NO: 15312 - DNA, 26 bp, Homo sapiens
agcaaatctggaaaaaatgagaaccg

SEQ ID NO: 15313 - DNA, 26 bp, Homo sapiens
gcaaatctggaaaaaatgagaaccga

SEQ ID NO: 15314 - DNA, 26 bp, Homo sapiens
caaatctggaaaaaatgagaaccgaa

SEQ ID NO: 15315 - DNA, 26 bp, Homo sapiens
aaatctggaaaaaatgagaaccgaaa

SEQ ID NO: 15316 - DNA, 26 bp, Homo sapiens
aatctggaaaaaatgagaaccgaaag

SEQ ID NO: 15317 - DNA, 26 bp, Homo sapiens
atctggaaaaaatgagaaccgaaagg

SEQ ID NO: 15318 - DNA, 26 bp, Homo sapiens
tctggaaaaaatgagaaccgaaaggg

SEQ ID NO: 15319 - DNA, 26 bp, Homo sapiens
ctggaaaaaatgagaaccgaaagggc

SEQ ID NO: 15320 - DNA, 26 bp, Homo sapiens
tggaaaaaatgagaaccgaaagggcc

SEQ ID NO: 15321 - DNA, 26 bp, Homo sapiens
ggaaaaaatgagaaccgaaagggcct

SEQ ID NO: 15322 - DNA, 26 bp, Homo sapiens
gaaaaaatgagaaccgaaagggcctt

SEQ ID NO: 15323 - DNA, 26 bp, Homo sapiens
aaaaaatgagaaccgaaagggccttg

SEQ ID NO: 15324 - DNA, 26 bp, Homo sapiens
aaaaatgagaaccgaaagggccttgc

SEQ ID NO: 15325 - DNA, 26 bp, Homo sapiens
aaaatgagaaccgaaagggccttgct

SEQ ID NO: 15326 - DNA, 26 bp, Homo sapiens
aaatgagaaccgaaagggccttgctc

SEQ ID NO: 15327 - DNA, 26 bp, Homo sapiens
aatgagaaccgaaagggccttgctcc

SEQ ID NO: 15328 - DNA, 26 bp, Homo sapiens
atgagaaccgaaagggccttgctccc

SEQ ID NO: 15329 - DNA, 26 bp, Homo sapiens
tgagaaccgaaagggccttgctccca

SEQ ID NO: 15330 - DNA, 26 bp, Homo sapiens
gagaaccgaaagggccttgctcccaa

SEQ ID NO: 15331 - DNA, 26 bp, Homo sapiens
agaaccgaaagggccttgctcccaac

SEQ ID NO: 15332 - DNA, 26 bp, Homo sapiens
gaaccgaaagggccttgctcccaacc

SEQ ID NO: 15333 - DNA, 26 bp, Homo sapiens
aaccgaaagggccttgctcccaaccc

SEQ ID NO: 15334 - DNA, 26 bp, Homo sapiens
accgaaagggccttgctcccaaccca

SEQ ID NO: 15335 - DNA, 26 bp, Homo sapiens
ccgaaagggccttgctcccaacccac

SEQ ID NO: 15336 - DNA, 26 bp, Homo sapiens
cgaaagggccttgctcccaacccaca

SEQ ID NO: 15337 - DNA, 26 bp, Homo sapiens
gaaagggccttgctcccaacccacac

SEQ ID NO: 15338 - DNA, 26 bp, Homo sapiens
aaagggccttgctcccaacccacact

SEQ ID NO: 15339 - DNA, 26 bp, Homo sapiens
aagggccttgctcccaacccacactg

SEQ ID NO: 15340 - DNA, 26 bp, Homo sapiens
agggccttgctcccaacccacactgc

SEQ ID NO: 15341 - DNA, 26 bp, Homo sapiens
gggccttgctcccaacccacactgcc

SEQ ID NO: 15342 - DNA, 26 bp, Homo sapiens
ggccttgctcccaacccacactgcct

SEQ ID NO: 15343 - DNA, 26 bp, Homo sapiens
gccttgctcccaacccacactgcctc

SEQ ID NO: 15344 - DNA, 26 bp, Homo sapiens
ccttgctcccaacccacactgcctca

SEQ ID NO: 15345 - DNA, 26 bp, Homo sapiens
cttgctcccaacccacactgcctcac

SEQ ID NO: 15346 - DNA, 26 bp, Homo sapiens
ttgctcccaacccacactgcctcaca

SEQ ID NO: 15347 - DNA, 26 bp, Homo sapiens
tgctcccaacccacactgcctcacac

SEQ ID NO: 15348 - DNA, 26 bp, Homo sapiens
gctcccaacccacactgcctcacacc

SEQ ID NO: 15349 - DNA, 26 bp, Homo sapiens
ctcccaacccacactgcctcacaccc

SEQ ID NO: 15350 - DNA, 26 bp, Homo sapiens
tcccaacccacactgcctcacaccct

SEQ ID NO: 15351 - DNA, 26 bp, Homo sapiens
cccaacccacactgcctcacaccctc

SEQ ID NO: 15352 - DNA, 26 bp, Homo sapiens
ccaacccacactgcctcacaccctct

SEQ ID NO: 15353 - DNA, 26 bp, Homo sapiens
caacccacactgcctcacaccctctc

SEQ ID NO: 15354 - DNA, 26 bp, Homo sapiens
aacccacactgcctcacaccctctcc

SEQ ID NO: 15355 - DNA, 26 bp, Homo sapiens
acccacactgcctcacaccctctccg

SEQ ID NO: 15356 - DNA, 26 bp, Homo sapiens
cccacactgcctcacaccctctccgt

SEQ ID NO: 15357 - DNA, 26 bp, Homo sapiens
ccacactgcctcacaccctctccgtg

SEQ ID NO: 15358 - DNA, 26 bp, Homo sapiens
cacactgcctcacaccctctccgtgg

SEQ ID NO: 15359 - DNA, 26 bp, Homo sapiens
acactgcctcacaccctctccgtgga

SEQ ID NO: 15360 - DNA, 26 bp, Homo sapiens
cactgcctcacaccctctccgtggaa

SEQ ID NO: 15361 - DNA, 26 bp, Homo sapiens
actgcctcacaccctctccgtggaaa

SEQ ID NO: 15362 - DNA, 26 bp, Homo sapiens
ctgcctcacaccctctccgtggaaaa

SEQ ID NO: 15363 - DNA, 26 bp, Homo sapiens
tgcctcacaccctctccgtggaaaag

SEQ ID NO: 15364 - DNA, 26 bp, Homo sapiens
gcctcacaccctctccgtggaaaagc

SEQ ID NO: 15365 - DNA, 26 bp, Homo sapiens
cctcacaccctctccgtggaaaagcc

SEQ ID NO: 15366 - DNA, 26 bp, Homo sapiens
ctcacaccctctccgtggaaaagccc

SEQ ID NO: 15367 - DNA, 26 bp, Homo sapiens
tcacaccctctccgtggaaaagcccg

SEQ ID NO: 15368 - DNA, 26 bp, Homo sapiens
cacaccctctccgtggaaaagcccgt

SEQ ID NO: 15369 - DNA, 26 bp, Homo sapiens
acaccctctccgtggaaaagcccgta

SEQ ID NO: 15370 - DNA, 26 bp, Homo sapiens
caccctctccgtggaaaagcccgtac

SEQ ID NO: 15371 - DNA, 26 bp, Homo sapiens
accctctccgtggaaaagcccgtact

SEQ ID NO: 15372 - DNA, 26 bp, Homo sapiens
ccctctccgtggaaaagcccgtactg

SEQ ID NO: 15373 - DNA, 26 bp, Homo sapiens
cctctccgtggaaaagcccgtactgc

SEQ ID NO: 15374 - DNA, 26 bp, Homo sapiens
ctctccgtggaaaagcccgtactgca

SEQ ID NO: 15375 - DNA, 26 bp, Homo sapiens
tctccgtggaaaagcccgtactgcat

SEQ ID NO: 15376 - DNA, 26 bp, Homo sapiens
ctccgtggaaaagcccgtactgcatt

SEQ ID NO: 15377 - DNA, 26 bp, Homo sapiens
tccgtggaaaagcccgtactgcattt

SEQ ID NO: 15378 - DNA, 26 bp, Homo sapiens
ccgtggaaaagcccgtactgcatttc

SEQ ID NO: 15379 - DNA, 26 bp, Homo sapiens
cgtggaaaagcccgtactgcatttca

SEQ ID NO: 15380 - DNA, 26 bp, Homo sapiens
gtggaaaagcccgtactgcatttcac

SEQ ID NO: 15381 - DNA, 26 bp, Homo sapiens
tggaaaagcccgtactgcatttcacc

SEQ ID NO: 15382 - DNA, 26 bp, Homo sapiens
ggaaaagcccgtactgcatttcaccc

SEQ ID NO: 15383 - DNA, 26 bp, Homo sapiens
gaaaagcccgtactgcatttcaccca

SEQ ID NO: 15384 - DNA, 26 bp, Homo sapiens
aaaagcccgtactgcatttcacccat

SEQ ID NO: 15385 - DNA, 26 bp, Homo sapiens
aaagcccgtactgcatttcacccata

SEQ ID NO: 15386 - DNA, 26 bp, Homo sapiens
aagcccgtactgcatttcacccataa

SEQ ID NO: 15387 - DNA, 26 bp, Homo sapiens
agcccgtactgcatttcacccataaa

SEQ ID NO: 15388 - DNA, 26 bp, Homo sapiens
gcccgtactgcatttcacccataaac

SEQ ID NO: 15389 - DNA, 26 bp, Homo sapiens
cccgtactgcatttcacccataaact

SEQ ID NO: 15390 - DNA, 26 bp, Homo sapiens
ccgtactgcatttcacccataaactt

SEQ ID NO: 15391 - DNA, 26 bp, Homo sapiens
cgtactgcatttcacccataaacttg

SEQ ID NO: 15392 - DNA, 26 bp, Homo sapiens
gtactgcatttcacccataaacttgt

SEQ ID NO: 15393 - DNA, 26 bp, Homo sapiens
tactgcatttcacccataaacttgtc

SEQ ID NO: 15394 - DNA, 26 bp, Homo sapiens
actgcatttcacccataaacttgtcc

SEQ ID NO: 15395 - DNA, 26 bp, Homo sapiens
ctgcatttcacccataaacttgtcca

SEQ ID NO: 15396 - DNA, 26 bp, Homo sapiens
tgcatttcacccataaacttgtccag

SEQ ID NO: 15397 - DNA, 26 bp, Homo sapiens
gcatttcacccataaacttgtccagc

SEQ ID NO: 15398 - DNA, 26 bp, Homo sapiens
catttcacccataaacttgtccagct

SEQ ID NO: 15399 - DNA, 26 bp, Homo sapiens
atttcacccataaacttgtccagctc

SEQ ID NO: 15400 - DNA, 26 bp, Homo sapiens
tttcacccataaacttgtccagctcc

SEQ ID NO: 15401 - DNA, 26 bp, Homo sapiens
ttcacccataaacttgtccagctcct

SEQ ID NO: 15402 - DNA, 26 bp, Homo sapiens
tcacccataaacttgtccagctcctg

SEQ ID NO: 15403 - DNA, 26 bp, Homo sapiens
cacccataaacttgtccagctcctgc

SEQ ID NO: 15404 - DNA, 26 bp, Homo sapiens
acccataaacttgtccagctcctgcc

SEQ ID NO: 15405 - DNA, 26 bp, Homo sapiens
cccataaacttgtccagctcctgccc

SEQ ID NO: 15406 - DNA, 26 bp, Homo sapiens
ccataaacttgtccagctcctgccct

SEQ ID NO: 15407 - DNA, 26 bp, Homo sapiens
cataaacttgtccagctcctgccctg

SEQ ID NO: 15408 - DNA, 26 bp, Homo sapiens
ataaacttgtccagctcctgccctga

SEQ ID NO: 15409 - DNA, 26 bp, Homo sapiens
taaacttgtccagctcctgccctgag

SEQ ID NO: 15410 - DNA, 26 bp, Homo sapiens
aaacttgtccagctcctgccctgagg

SEQ ID NO: 15411 - DNA, 26 bp, Homo sapiens
aacttgtccagctcctgccctgaggc

SEQ ID NO: 15412 - DNA, 26 bp, Homo sapiens
acttgtccagctcctgccctgaggca

SEQ ID NO: 15413 - DNA, 26 bp, Homo sapiens
cttgtccagctcctgccctgaggcat

SEQ ID NO: 15414 - DNA, 26 bp, Homo sapiens
ttgtccagctcctgccctgaggcatt

SEQ ID NO: 15415 - DNA, 26 bp, Homo sapiens
tgtccagctcctgccctgaggcattg

SEQ ID NO: 15416 - DNA, 26 bp, Homo sapiens
gtccagctcctgccctgaggcattga

SEQ ID NO: 15417 - DNA, 26 bp, Homo sapiens
tccagctcctgccctgaggcattgac

SEQ ID NO: 15418 - DNA, 26 bp, Homo sapiens
ccagctcctgccctgaggcattgacg

SEQ ID NO: 15419 - DNA, 26 bp, Homo sapiens
cagctcctgccctgaggcattgacga

SEQ ID NO: 15420 - DNA, 26 bp, Homo sapiens
agctcctgccctgaggcattgacgag

SEQ ID NO: 15421 - DNA, 26 bp, Homo sapiens
gctcctgccctgaggcattgacgagc

SEQ ID NO: 15422 - DNA, 26 bp, Homo sapiens
ctcctgccctgaggcattgacgagca

SEQ ID NO: 15423 - DNA, 26 bp, Homo sapiens
tcctgccctgaggcattgacgagcag

SEQ ID NO: 15424 - DNA, 26 bp, Homo sapiens
cctgccctgaggcattgacgagcaga

SEQ ID NO: 15425 - DNA, 26 bp, Homo sapiens
ctgccctgaggcattgacgagcagag

SEQ ID NO: 15426 - DNA, 26 bp, Homo sapiens
tgccctgaggcattgacgagcagagc

SEQ ID NO: 15427 - DNA, 26 bp, Homo sapiens
gccctgaggcattgacgagcagagct

SEQ ID NO: 15428 - DNA, 26 bp, Homo sapiens
ccctgaggcattgacgagcagagctc

SEQ ID NO: 15429 - DNA, 26 bp, Homo sapiens
cctgaggcattgacgagcagagctcc

SEQ ID NO: 15430 - DNA, 26 bp, Homo sapiens
ctgaggcattgacgagcagagctccc

SEQ ID NO: 15431 - DNA, 26 bp, Homo sapiens
tgaggcattgacgagcagagctcccg

SEQ ID NO: 15432 - DNA, 26 bp, Homo sapiens
gaggcattgacgagcagagctcccgt

SEQ ID NO: 15433 - DNA, 26 bp, Homo sapiens
aggcattgacgagcagagctcccgtt

SEQ ID NO: 15434 - DNA, 26 bp, Homo sapiens
ggcattgacgagcagagctcccgttt

SEQ ID NO: 15435 - DNA, 26 bp, Homo sapiens
gcattgacgagcagagctcccgtttt

SEQ ID NO: 15436 - DNA, 26 bp, Homo sapiens
cattgacgagcagagctcccgttttg

SEQ ID NO: 15437 - DNA, 26 bp, Homo sapiens
attgacgagcagagctcccgttttgc

SEQ ID NO: 15438 - DNA, 26 bp, Homo sapiens
ttgacgagcagagctcccgttttgca

SEQ ID NO: 15439 - DNA, 26 bp, Homo sapiens
tgacgagcagagctcccgttttgcag

SEQ ID NO: 15440 - DNA, 26 bp, Homo sapiens
gacgagcagagctcccgttttgcaga

SEQ ID NO: 15441 - DNA, 26 bp, Homo sapiens
acgagcagagctcccgttttgcagag

SEQ ID NO: 15442 - DNA, 26 bp, Homo sapiens
cgagcagagctcccgttttgcagagg

SEQ ID NO: 15443 - DNA, 26 bp, Homo sapiens
gagcagagctcccgttttgcagagga

SEQ ID NO: 15444 - DNA, 26 bp, Homo sapiens
agcagagctcccgttttgcagaggac

SEQ ID NO: 15445 - DNA, 26 bp, Homo sapiens
gcagagctcccgttttgcagaggaca

SEQ ID NO: 15446 - DNA, 26 bp, Homo sapiens
cagagctcccgttttgcagaggacag

SEQ ID NO: 15447 - DNA, 26 bp, Homo sapiens
agagctcccgttttgcagaggacagt

SEQ ID NO: 15448 - DNA, 26 bp, Homo sapiens
gagctcccgttttgcagaggacagtg

SEQ ID NO: 15449 - DNA, 26 bp, Homo sapiens
agctcccgttttgcagaggacagtgg

SEQ ID NO: 15450 - DNA, 26 bp, Homo sapiens
gctcccgttttgcagaggacagtggc

SEQ ID NO: 15451 - DNA, 26 bp, Homo sapiens
ctcccgttttgcagaggacagtggct

SEQ ID NO: 15452 - DNA, 26 bp, Homo sapiens
tcccgttttgcagaggacagtggctt

SEQ ID NO: 15453 - DNA, 26 bp, Homo sapiens
cccgttttgcagaggacagtggcttt

SEQ ID NO: 15454 - DNA, 26 bp, Homo sapiens
ccgttttgcagaggacagtggctttg

SEQ ID NO: 15455 - DNA, 26 bp, Homo sapiens
cgttttgcagaggacagtggctttga

SEQ ID NO: 15456 - DNA, 26 bp, Homo sapiens
gttttgcagaggacagtggctttgat

SEQ ID NO: 15457 - DNA, 26 bp, Homo sapiens
ttttgcagaggacagtggctttgatc

SEQ ID NO: 15458 - DNA, 26 bp, Homo sapiens
tttgcagaggacagtggctttgatcc

SEQ ID NO: 15459 - DNA, 26 bp, Homo sapiens
ttgcagaggacagtggctttgatcca

SEQ ID NO: 15460 - DNA, 26 bp, Homo sapiens
tgcagaggacagtggctttgatccac

SEQ ID NO: 15461 - DNA, 26 bp, Homo sapiens
gcagaggacagtggctttgatccaca

SEQ ID NO: 15462 - DNA, 26 bp, Homo sapiens
cagaggacagtggctttgatccacaa

SEQ ID NO: 15463 - DNA, 26 bp, Homo sapiens
agaggacagtggctttgatccacaac

SEQ ID NO: 15464 - DNA, 26 bp, Homo sapiens
gaggacagtggctttgatccacaacg

SEQ ID NO: 15465 - DNA, 26 bp, Homo sapiens
aggacagtggctttgatccacaacgg

SEQ ID NO: 15466 - DNA, 26 bp, Homo sapiens
ggacagtggctttgatccacaacggt

SEQ ID NO: 15467 - DNA, 26 bp, Homo sapiens
gacagtggctttgatccacaacggtg

SEQ ID NO: 15468 - DNA, 26 bp, Homo sapiens
acagtggctttgatccacaacggtgt

SEQ ID NO: 15469 - DNA, 26 bp, Homo sapiens
cagtggctttgatccacaacggtgtc

SEQ ID NO: 15470 - DNA, 26 bp, Homo sapiens
agtggctttgatccacaacggtgtcc

SEQ ID NO: 15471 - DNA, 26 bp, Homo sapiens
gtggctttgatccacaacggtgtccc

SEQ ID NO: 15472 - DNA, 26 bp, Homo sapiens
tggctttgatccacaacggtgtcccc

SEQ ID NO: 15473 - DNA, 26 bp, Homo sapiens
ggctttgatccacaacggtgtcccca

SEQ ID NO: 15474 - DNA, 26 bp, Homo sapiens
gctttgatccacaacggtgtccccaa

SEQ ID NO: 15475 - DNA, 26 bp, Homo sapiens
ctttgatccacaacggtgtccccaag

SEQ ID NO: 15476 - DNA, 26 bp, Homo sapiens
tttgatccacaacggtgtccccaagg

SEQ ID NO: 15477 - DNA, 26 bp, Homo sapiens
ttgatccacaacggtgtccccaaggc

SEQ ID NO: 15478 - DNA, 26 bp, Homo sapiens
tgatccacaacggtgtccccaaggct

SEQ ID NO: 15479 - DNA, 26 bp, Homo sapiens
gatccacaacggtgtccccaaggctg

SEQ ID NO: 15480 - DNA, 26 bp, Homo sapiens
atccacaacggtgtccccaaggctgt

SEQ ID NO: 15481 - DNA, 26 bp, Homo sapiens
tccacaacggtgtccccaaggctgtc

SEQ ID NO: 15482 - DNA, 26 bp, Homo sapiens
ccacaacggtgtccccaaggctgtca

SEQ ID NO: 15483 - DNA, 26 bp, Homo sapiens
cacaacggtgtccccaaggctgtcac

SEQ ID NO: 15484 - DNA, 26 bp, Homo sapiens
acaacggtgtccccaaggctgtcaca

SEQ ID NO: 15485 - DNA, 26 bp, Homo sapiens
caacggtgtccccaaggctgtcacaa

SEQ ID NO: 15486 - DNA, 26 bp, Homo sapiens
aacggtgtccccaaggctgtcacaac

SEQ ID NO: 15487 - DNA, 26 bp, Homo sapiens
acggtgtccccaaggctgtcacaact

SEQ ID NO: 15488 - DNA, 26 bp, Homo sapiens
cggtgtccccaaggctgtcacaactc

SEQ ID NO: 15489 - DNA, 26 bp, Homo sapiens
ggtgtccccaaggctgtcacaactcc

SEQ ID NO: 15490 - DNA, 26 bp, Homo sapiens
gtgtccccaaggctgtcacaactccg

SEQ ID NO: 15491 - DNA, 26 bp, Homo sapiens
tgtccccaaggctgtcacaactccga

SEQ ID NO: 15492 - DNA, 26 bp, Homo sapiens
gtccccaaggctgtcacaactccgag

SEQ ID NO: 15493 - DNA, 26 bp, Homo sapiens
tccccaaggctgtcacaactccgagg

SEQ ID NO: 15494 - DNA, 26 bp, Homo sapiens
ccccaaggctgtcacaactccgaggg

SEQ ID NO: 15495 - DNA, 26 bp, Homo sapiens
cccaaggctgtcacaactccgagggc

SEQ ID NO: 15496 - DNA, 26 bp, Homo sapiens
ccaaggctgtcacaactccgagggca

SEQ ID NO: 15497 - DNA, 26 bp, Homo sapiens
caaggctgtcacaactccgagggcac

SEQ ID NO: 15498 - DNA, 26 bp, Homo sapiens
aaggctgtcacaactccgagggcaca

SEQ ID NO: 15499 - DNA, 26 bp, Homo sapiens
aggctgtcacaactccgagggcacat

SEQ ID NO: 15500 - DNA, 26 bp, Homo sapiens
ggctgtcacaactccgagggcacatg

SEQ ID NO: 15501 - DNA, 26 bp, Homo sapiens
gctgtcacaactccgagggcacatgc

SEQ ID NO: 15502 - DNA, 26 bp, Homo sapiens
ctgtcacaactccgagggcacatgca

SEQ ID NO: 15503 - DNA, 26 bp, Homo sapiens
tgtcacaactccgagggcacatgcaa

SEQ ID NO: 15504 - DNA, 26 bp, Homo sapiens
gtcacaactccgagggcacatgcaaa

SEQ ID NO: 15505 - DNA, 26 bp, Homo sapiens
tcacaactccgagggcacatgcaaaa

SEQ ID NO: 15506 - DNA, 26 bp, Homo sapiens
cacaactccgagggcacatgcaaaac

SEQ ID NO: 15507 - DNA, 26 bp, Homo sapiens
acaactccgagggcacatgcaaaact

SEQ ID NO: 15508 - DNA, 26 bp, Homo sapiens
caactccgagggcacatgcaaaactg

SEQ ID NO: 15509 - DNA, 26 bp, Homo sapiens
aactccgagggcacatgcaaaactga

SEQ ID NO: 15510 - DNA, 26 bp, Homo sapiens
actccgagggcacatgcaaaactgaa

SEQ ID NO: 15511 - DNA, 26 bp, Homo sapiens
ctccgagggcacatgcaaaactgaac

SEQ ID NO: 15512 - DNA, 26 bp, Homo sapiens
tccgagggcacatgcaaaactgaaca

SEQ ID NO: 15513 - DNA, 26 bp, Homo sapiens
ccgagggcacatgcaaaactgaacac

SEQ ID NO: 15514 - DNA, 26 bp, Homo sapiens
cgagggcacatgcaaaactgaacact

SEQ ID NO: 15515 - DNA, 26 bp, Homo sapiens
gagggcacatgcaaaactgaacactc

SEQ ID NO: 15516 - DNA, 26 bp, Homo sapiens
agggcacatgcaaaactgaacactcc

SEQ ID NO: 15517 - DNA, 26 bp, Homo sapiens
gggcacatgcaaaactgaacactccg

SEQ ID NO: 15518 - DNA, 26 bp, Homo sapiens
ggcacatgcaaaactgaacactccgg

SEQ ID NO: 15519 - DNA, 26 bp, Homo sapiens
gcacatgcaaaactgaacactccggc

SEQ ID NO: 15520 - DNA, 26 bp, Homo sapiens
cacatgcaaaactgaacactccggcc

SEQ ID NO: 15521 - DNA, 26 bp, Homo sapiens
acatgcaaaactgaacactccggcca

SEQ ID NO: 15522 - DNA, 26 bp, Homo sapiens
catgcaaaactgaacactccggccat

SEQ ID NO: 15523 - DNA, 26 bp, Homo sapiens
atgcaaaactgaacactccggccatg

SEQ ID NO: 15524 - DNA, 26 bp, Homo sapiens
tgcaaaactgaacactccggccatgc

SEQ ID NO: 15525 - DNA, 26 bp, Homo sapiens
gcaaaactgaacactccggccatgca

SEQ ID NO: 15526 - DNA, 26 bp, Homo sapiens
caaaactgaacactccggccatgcaa

SEQ ID NO: 15527 - DNA, 26 bp, Homo sapiens
aaaactgaacactccggccatgcaaa

SEQ ID NO: 15528 - DNA, 26 bp, Homo sapiens
aaactgaacactccggccatgcaaaa

SEQ ID NO: 15529 - DNA, 26 bp, Homo sapiens
aactgaacactccggccatgcaaaaa

SEQ ID NO: 15530 - DNA, 26 bp, Homo sapiens
actgaacactccggccatgcaaaaaa

SEQ ID NO: 15531 - DNA, 26 bp, Homo sapiens
ctgaacactccggccatgcaaaaaat

SEQ ID NO: 15532 - DNA, 26 bp, Homo sapiens
tgaacactccggccatgcaaaaaatg

SEQ ID NO: 15533 - DNA, 26 bp, Homo sapiens
gaacactccggccatgcaaaaaatga

SEQ ID NO: 15534 - DNA, 26 bp, Homo sapiens
aacactccggccatgcaaaaaatgat

SEQ ID NO: 15535 - DNA, 26 bp, Homo sapiens
acactccggccatgcaaaaaatgatt

SEQ ID NO: 15536 - DNA, 26 bp, Homo sapiens
cactccggccatgcaaaaaatgattt

SEQ ID NO: 15537 - DNA, 26 bp, Homo sapiens
actccggccatgcaaaaaatgatttt

SEQ ID NO: 15538 - DNA, 26 bp, Homo sapiens
ctccggccatgcaaaaaatgattttc

SEQ ID NO: 15539 - DNA, 26 bp, Homo sapiens
tccggccatgcaaaaaatgattttct

SEQ ID NO: 15540 - DNA, 26 bp, Homo sapiens
ccggccatgcaaaaaatgattttctt

SEQ ID NO: 15541 - DNA, 26 bp, Homo sapiens
cggccatgcaaaaaatgattttcttc

SEQ ID NO: 15542 - DNA, 26 bp, Homo sapiens
ggccatgcaaaaaatgattttcttct

SEQ ID NO: 15543 - DNA, 26 bp, Homo sapiens
gccatgcaaaaaatgattttcttctg

SEQ ID NO: 15544 - DNA, 26 bp, Homo sapiens
ccatgcaaaaaatgattttcttctgt

SEQ ID NO: 15545 - DNA, 26 bp, Homo sapiens
catgcaaaaaatgattttcttctgtt

SEQ ID NO: 15546 - DNA, 26 bp, Homo sapiens
atgcaaaaaatgattttcttctgttg

SEQ ID NO: 15547 - DNA, 26 bp, Homo sapiens
tgcaaaaaatgattttcttctgttgg

SEQ ID NO: 15548 - DNA, 26 bp, Homo sapiens
gcaaaaaatgattttcttctgttggc

SEQ ID NO: 15549 - DNA, 26 bp, Homo sapiens
caaaaaatgattttcttctgttggct

SEQ ID NO: 15550 - DNA, 26 bp, Homo sapiens
aaaaaatgattttcttctgttggctt

SEQ ID NO: 15551 - DNA, 26 bp, Homo sapiens
aaaaatgattttcttctgttggcttg

SEQ ID NO: 15552 - DNA, 26 bp, Homo sapiens
aaaatgattttcttctgttggcttgg

SEQ ID NO: 15553 - DNA, 26 bp, Homo sapiens
aaatgattttcttctgttggcttggc

SEQ ID NO: 15554 - DNA, 26 bp, Homo sapiens
aatgattttcttctgttggcttggca

SEQ ID NO: 15555 - DNA, 26 bp, Homo sapiens
atgattttcttctgttggcttggcat

SEQ ID NO: 15556 - DNA, 26 bp, Homo sapiens
tgattttcttctgttggcttggcatg

SEQ ID NO: 15557 - DNA, 26 bp, Homo sapiens
gattttcttctgttggcttggcatga

SEQ ID NO: 15558 - DNA, 26 bp, Homo sapiens
attttcttctgttggcttggcatgat

SEQ ID NO: 15559 - DNA, 26 bp, Homo sapiens
ttttcttctgttggcttggcatgatg

SEQ ID NO: 15560 - DNA, 26 bp, Homo sapiens
tttcttctgttggcttggcatgatga

SEQ ID NO: 15561 - DNA, 26 bp, Homo sapiens
ttcttctgttggcttggcatgatgag

SEQ ID NO: 15562 - DNA, 26 bp, Homo sapiens
tcttctgttggcttggcatgatgaga

SEQ ID NO: 15563 - DNA, 26 bp, Homo sapiens
cttctgttggcttggcatgatgagaa

SEQ ID NO: 15564 - DNA, 26 bp, Homo sapiens
ttctgttggcttggcatgatgagaaa

SEQ ID NO: 15565 - DNA, 26 bp, Homo sapiens
tctgttggcttggcatgatgagaaac

SEQ ID NO: 15566 - DNA, 26 bp, Homo sapiens
ctgttggcttggcatgatgagaaacg

SEQ ID NO: 15567 - DNA, 26 bp, Homo sapiens
tgttggcttggcatgatgagaaacgg

SEQ ID NO: 15568 - DNA, 26 bp, Homo sapiens
gttggcttggcatgatgagaaacggc

SEQ ID NO: 15569 - DNA, 26 bp, Homo sapiens
ttggcttggcatgatgagaaacggct

SEQ ID NO: 15570 - DNA, 26 bp, Homo sapiens
tggcttggcatgatgagaaacggctt

SEQ ID NO: 15571 - DNA, 26 bp, Homo sapiens
ggcttggcatgatgagaaacggcttc

SEQ ID NO: 15572 - DNA, 26 bp, Homo sapiens
gcttggcatgatgagaaacggcttct

SEQ ID NO: 15573 - DNA, 26 bp, Homo sapiens
cttggcatgatgagaaacggcttctg

SEQ ID NO: 15574 - DNA, 26 bp, Homo sapiens
ttggcatgatgagaaacggcttctgt

SEQ ID NO: 15575 - DNA, 26 bp, Homo sapiens
tgcgtgaaacttggtgaatctttatt

SEQ ID NO: 15576 - DNA, 26 bp, Homo sapiens
gcgtgaaacttggtgaatctttatta

SEQ ID NO: 15577 - DNA, 26 bp, Homo sapiens
cgtgaaacttggtgaatctttattaa

SEQ ID NO: 15578 - DNA, 26 bp, Homo sapiens
gtgaaacttggtgaatctttattaaa

SEQ ID NO: 15579 - DNA, 26 bp, Homo sapiens
tgaaacttggtgaatctttattaaac

SEQ ID NO: 15580 - DNA, 26 bp, Homo sapiens
gaaacttggtgaatctttattaaact

SEQ ID NO: 15581 - DNA, 26 bp, Homo sapiens
aaacttggtgaatctttattaaacta

SEQ ID NO: 15582 - DNA, 26 bp, Homo sapiens
aacttggtgaatctttattaaactag

SEQ ID NO: 15583 - DNA, 26 bp, Homo sapiens
acttggtgaatctttattaaactagg

SEQ ID NO: 15584 - DNA, 26 bp, Homo sapiens
cttggtgaatctttattaaactaggg

SEQ ID NO: 15585 - DNA, 26 bp, Homo sapiens
ttggtgaatctttattaaactagggt

SEQ ID NO: 15586 - DNA, 26 bp, Homo sapiens
tggtgaatctttattaaactagggtc

SEQ ID NO: 15587 - DNA, 26 bp, Homo sapiens
ggtgaatctttattaaactagggtcc

SEQ ID NO: 15588 - DNA, 26 bp, Homo sapiens
gtgaatctttattaaactagggtcca

SEQ ID NO: 15589 - DNA, 26 bp, Homo sapiens
tgaatctttattaaactagggtccac

SEQ ID NO: 15590 - DNA, 26 bp, Homo sapiens
gaatctttattaaactagggtccacc

SEQ ID NO: 15591 - DNA, 26 bp, Homo sapiens
aatctttattaaactagggtccaccc

SEQ ID NO: 15592 - DNA, 26 bp, Homo sapiens
atctttattaaactagggtccacccc

SEQ ID NO: 15593 - DNA, 26 bp, Homo sapiens
tctttattaaactagggtccacccca

SEQ ID NO: 15594 - DNA, 26 bp, Homo sapiens
ctttattaaactagggtccaccccag

SEQ ID NO: 15595 - DNA, 26 bp, Homo sapiens
tttattaaactagggtccaccccagg

SEQ ID NO: 15596 - DNA, 26 bp, Homo sapiens
ttattaaactagggtccaccccagga

SEQ ID NO: 15597 - DNA, 26 bp, Homo sapiens
tattaaactagggtccaccccaggag

SEQ ID NO: 15598 - DNA, 26 bp, Homo sapiens
attaaactagggtccaccccaggagg

SEQ ID NO: 15599 - DNA, 26 bp, Homo sapiens
ttaaactagggtccaccccaggagga

SEQ ID NO: 15600 - DNA, 26 bp, Homo sapiens
taaactagggtccaccccaggaggac

SEQ ID NO: 15601 - DNA, 26 bp, Homo sapiens
aaactagggtccaccccaggaggacg

SEQ ID NO: 15602 - DNA, 26 bp, Homo sapiens
aactagggtccaccccaggaggacgg

SEQ ID NO: 15603 - DNA, 26 bp, Homo sapiens
actagggtccaccccaggaggacggc

SEQ ID NO: 15604 - DNA, 26 bp, Homo sapiens
ctagggtccaccccaggaggacggct

SEQ ID NO: 15605 - DNA, 26 bp, Homo sapiens
tagggtccaccccaggaggacggctg

SEQ ID NO: 15606 - DNA, 26 bp, Homo sapiens
agggtccaccccaggaggacggctgg

SEQ ID NO: 15607 - DNA, 26 bp, Homo sapiens
gggtccaccccaggaggacggctggg

SEQ ID NO: 15608 - DNA, 26 bp, Homo sapiens
ggtccaccccaggaggacggctgggg

SEQ ID NO: 15609 - DNA, 26 bp, Homo sapiens
gtccaccccaggaggacggctggggc

SEQ ID NO: 15610 - DNA, 26 bp, Homo sapiens
tccaccccaggaggacggctggggcg

SEQ ID NO: 15611 - DNA, 26 bp, Homo sapiens
ccaccccaggaggacggctggggcgg

SEQ ID NO: 15612 - DNA, 26 bp, Homo sapiens
caccccaggaggacggctggggcggg

SEQ ID NO: 15613 - DNA, 26 bp, Homo sapiens
accccaggaggacggctggggcgggg

SEQ ID NO: 15614 - DNA, 26 bp, Homo sapiens
ccccaggaggacggctggggcgggga

SEQ ID NO: 15615 - DNA, 26 bp, Homo sapiens
cccaggaggacggctggggcggggac

SEQ ID NO: 15616 - DNA, 26 bp, Homo sapiens
ccaggaggacggctggggcggggaca

SEQ ID NO: 15617 - DNA, 26 bp, Homo sapiens
caggaggacggctggggcggggacag

SEQ ID NO: 15618 - DNA, 26 bp, Homo sapiens
aggaggacggctggggcggggacagg

SEQ ID NO: 15619 - DNA, 26 bp, Homo sapiens
ggaggacggctggggcggggacaggg

SEQ ID NO: 15620 - DNA, 26 bp, Homo sapiens
gaggacggctggggcggggacagggt

SEQ ID NO: 15621 - DNA, 26 bp, Homo sapiens
aggacggctggggcggggacagggtc

SEQ ID NO: 15622 - DNA, 26 bp, Homo sapiens
ggacggctggggcggggacagggtct

SEQ ID NO: 15623 - DNA, 26 bp, Homo sapiens
gacggctggggcggggacagggtctc

SEQ ID NO: 15624 - DNA, 26 bp, Homo sapiens
acggctggggcggggacagggtctcc

SEQ ID NO: 15625 - DNA, 26 bp, Homo sapiens
cggctggggcggggacagggtctccc

SEQ ID NO: 15626 - DNA, 26 bp, Homo sapiens
ggctggggcggggacagggtctcccg

SEQ ID NO: 15627 - DNA, 26 bp, Homo sapiens
gctggggcggggacagggtctcccgc

SEQ ID NO: 15628 - DNA, 26 bp, Homo sapiens
ctggggcggggacagggtctcccgct

SEQ ID NO: 15629 - DNA, 26 bp, Homo sapiens
tggggcggggacagggtctcccgctg

SEQ ID NO: 15630 - DNA, 26 bp, Homo sapiens
ggggcggggacagggtctcccgctgc

SEQ ID NO: 15631 - DNA, 26 bp, Homo sapiens
gggcggggacagggtctcccgctgca

SEQ ID NO: 15632 - DNA, 26 bp, Homo sapiens
ggcggggacagggtctcccgctgcag

SEQ ID NO: 15633 - DNA, 26 bp, Homo sapiens
gcggggacagggtctcccgctgcagg

SEQ ID NO: 15634 - DNA, 26 bp, Homo sapiens
cggggacagggtctcccgctgcaggc

SEQ ID NO: 15635 - DNA, 26 bp, Homo sapiens
ggggacagggtctcccgctgcaggct

SEQ ID NO: 15636 - DNA, 26 bp, Homo sapiens
gggacagggtctcccgctgcaggctg

SEQ ID NO: 15637 - DNA, 26 bp, Homo sapiens
ggacagggtctcccgctgcaggctgc

SEQ ID NO: 15638 - DNA, 26 bp, Homo sapiens
gacagggtctcccgctgcaggctgcg

SEQ ID NO: 15639 - DNA, 26 bp, Homo sapiens
acagggtctcccgctgcaggctgcgc

SEQ ID NO: 15640 - DNA, 26 bp, Homo sapiens
cagggtctcccgctgcaggctgcgcg

SEQ ID NO: 15641 - DNA, 26 bp, Homo sapiens
agggtctcccgctgcaggctgcgcgg

SEQ ID NO: 15642 - DNA, 26 bp, Homo sapiens
gggtctcccgctgcaggctgcgcgga

SEQ ID NO: 15643 - DNA, 26 bp, Homo sapiens
ggtctcccgctgcaggctgcgcggag

SEQ ID NO: 15644 - DNA, 26 bp, Homo sapiens
gtctcccgctgcaggctgcgcggagg

SEQ ID NO: 15645 - DNA, 26 bp, Homo sapiens
tctcccgctgcaggctgcgcggaggc

SEQ ID NO: 15646 - DNA, 26 bp, Homo sapiens
ctcccgctgcaggctgcgcggaggca

SEQ ID NO: 15647 - DNA, 26 bp, Homo sapiens
tcccgctgcaggctgcgcggaggcag

SEQ ID NO: 15648 - DNA, 26 bp, Homo sapiens
cccgctgcaggctgcgcggaggcagg

SEQ ID NO: 15649 - DNA, 26 bp, Homo sapiens
ccgctgcaggctgcgcggaggcagga

SEQ ID NO: 15650 - DNA, 26 bp, Homo sapiens
cgctgcaggctgcgcggaggcaggag

SEQ ID NO: 15651 - DNA, 26 bp, Homo sapiens
gctgcaggctgcgcggaggcaggagg

SEQ ID NO: 15652 - DNA, 26 bp, Homo sapiens
ctgcaggctgcgcggaggcaggaggc

SEQ ID NO: 15653 - DNA, 26 bp, Homo sapiens
tgcaggctgcgcggaggcaggaggca

SEQ ID NO: 15654 - DNA, 26 bp, Homo sapiens
gcaggctgcgcggaggcaggaggcac

SEQ ID NO: 15655 - DNA, 26 bp, Homo sapiens
caggctgcgcggaggcaggaggcacg

SEQ ID NO: 15656 - DNA, 26 bp, Homo sapiens
aggctgcgcggaggcaggaggcacgg

SEQ ID NO: 15657 - DNA, 26 bp, Homo sapiens
ggctgcgcggaggcaggaggcacggg

SEQ ID NO: 15658 - DNA, 26 bp, Homo sapiens
gctgcgcggaggcaggaggcacgggg

SEQ ID NO: 15659 - DNA, 26 bp, Homo sapiens
ctgcgcggaggcaggaggcacggggt

SEQ ID NO: 15660 - DNA, 26 bp, Homo sapiens
tgcgcggaggcaggaggcacggggtg

SEQ ID NO: 15661 - DNA, 26 bp, Homo sapiens
gcgcggaggcaggaggcacggggtgg

SEQ ID NO: 15662 - DNA, 26 bp, Homo sapiens
cgcggaggcaggaggcacggggtggc

SEQ ID NO: 15663 - DNA, 26 bp, Homo sapiens
gcggaggcaggaggcacggggtggcg

SEQ ID NO: 15664 - DNA, 26 bp, Homo sapiens
cggaggcaggaggcacggggtggcgt

SEQ ID NO: 15665 - DNA, 26 bp, Homo sapiens
ggaggcaggaggcacggggtggcgtg

SEQ ID NO: 15666 - DNA, 26 bp, Homo sapiens
gaggcaggaggcacggggtggcgtgg

SEQ ID NO: 15667 - DNA, 26 bp, Homo sapiens
aggcaggaggcacggggtggcgtggg

SEQ ID NO: 15668 - DNA, 26 bp, Homo sapiens
ggcaggaggcacggggtggcgtgggg

SEQ ID NO: 15669 - DNA, 26 bp, Homo sapiens
gcaggaggcacggggtggcgtggggt

SEQ ID NO: 15670 - DNA, 26 bp, Homo sapiens
caggaggcacggggtggcgtggggtc

SEQ ID NO: 15671 - DNA, 26 bp, Homo sapiens
aggaggcacggggtggcgtggggtcg

SEQ ID NO: 15672 - DNA, 26 bp, Homo sapiens
ggaggcacggggtggcgtggggtcgc

SEQ ID NO: 15673 - DNA, 26 bp, Homo sapiens
gaggcacggggtggcgtggggtcgca

SEQ ID NO: 15674 - DNA, 26 bp, Homo sapiens
aggcacggggtggcgtggggtcgcat

SEQ ID NO: 15675 - DNA, 26 bp, Homo sapiens
ggcacggggtggcgtggggtcgcatg

SEQ ID NO: 15676 - DNA, 26 bp, Homo sapiens
gcacggggtggcgtggggtcgcatgg

SEQ ID NO: 15677 - DNA, 26 bp, Homo sapiens
cacggggtggcgtggggtcgcatggc

SEQ ID NO: 15678 - DNA, 26 bp, Homo sapiens
acggggtggcgtggggtcgcatggct

SEQ ID NO: 15679 - DNA, 26 bp, Homo sapiens
cggggtggcgtggggtcgcatggctg

SEQ ID NO: 15680 - DNA, 26 bp, Homo sapiens
ggggtggcgtggggtcgcatggctgc

SEQ ID NO: 15681 - DNA, 26 bp, Homo sapiens
gggtggcgtggggtcgcatggctgca

SEQ ID NO: 15682 - DNA, 26 bp, Homo sapiens
ggtggcgtggggtcgcatggctgcag

SEQ ID NO: 15683 - DNA, 26 bp, Homo sapiens
gtggcgtggggtcgcatggctgcagg

SEQ ID NO: 15684 - DNA, 26 bp, Homo sapiens
tggcgtggggtcgcatggctgcaggc

SEQ ID NO: 15685 - DNA, 26 bp, Homo sapiens
ggcgtggggtcgcatggctgcaggct

SEQ ID NO: 15686 - DNA, 26 bp, Homo sapiens
gcgtggggtcgcatggctgcaggctt

SEQ ID NO: 15687 - DNA, 26 bp, Homo sapiens
cgtggggtcgcatggctgcaggcttc

SEQ ID NO: 15688 - DNA, 26 bp, Homo sapiens
gtggggtcgcatggctgcaggcttcg

SEQ ID NO: 15689 - DNA, 26 bp, Homo sapiens
tggggtcgcatggctgcaggcttcgg

SEQ ID NO: 15690 - DNA, 26 bp, Homo sapiens
ggggtcgcatggctgcaggcttcggc

SEQ ID NO: 15691 - DNA, 26 bp, Homo sapiens
gggtcgcatggctgcaggcttcggcg

SEQ ID NO: 15692 - DNA, 26 bp, Homo sapiens
ggtcgcatggctgcaggcttcggcgt

SEQ ID NO: 15693 - DNA, 26 bp, Homo sapiens
gtcgcatggctgcaggcttcggcgtt

SEQ ID NO: 15694 - DNA, 26 bp, Homo sapiens
tcgcatggctgcaggcttcggcgttc

SEQ ID NO: 15695 - DNA, 26 bp, Homo sapiens
cgcatggctgcaggcttcggcgttca

SEQ ID NO: 15696 - DNA, 26 bp, Homo sapiens
gcatggctgcaggcttcggcgttcag

SEQ ID NO: 15697 - DNA, 26 bp, Homo sapiens
catggctgcaggcttcggcgttcagt

SEQ ID NO: 15698 - DNA, 26 bp, Homo sapiens
atggctgcaggcttcggcgttcagtg

SEQ ID NO: 15699 - DNA, 26 bp, Homo sapiens
tggctgcaggcttcggcgttcagtga

SEQ ID NO: 15700 - DNA, 26 bp, Homo sapiens
ggctgcaggcttcggcgttcagtgat

SEQ ID NO: 15701 - DNA, 26 bp, Homo sapiens
gctgcaggcttcggcgttcagtgatt

SEQ ID NO: 15702 - DNA, 26 bp, Homo sapiens
ctgcaggcttcggcgttcagtgattg

SEQ ID NO: 15703 - DNA, 26 bp, Homo sapiens
tgcaggcttcggcgttcagtgattgt

SEQ ID NO: 15704 - DNA, 26 bp, Homo sapiens
gcaggcttcggcgttcagtgattgtc

SEQ ID NO: 15705 - DNA, 26 bp, Homo sapiens
caggcttcggcgttcagtgattgtcg

SEQ ID NO: 15706 - DNA, 26 bp, Homo sapiens
aggcttcggcgttcagtgattgtcgc

SEQ ID NO: 15707 - DNA, 26 bp, Homo sapiens
ggcttcggcgttcagtgattgtcgct

SEQ ID NO: 15708 - DNA, 26 bp, Homo sapiens
gcttcggcgttcagtgattgtcgctg

SEQ ID NO: 15709 - DNA, 26 bp, Homo sapiens
cttcggcgttcagtgattgtcgctgg

SEQ ID NO: 15710 - DNA, 26 bp, Homo sapiens
ttcggcgttcagtgattgtcgctggg

SEQ ID NO: 15711 - DNA, 26 bp, Homo sapiens
tcggcgttcagtgattgtcgctgggc

SEQ ID NO: 15712 - DNA, 26 bp, Homo sapiens
cggcgttcagtgattgtcgctgggca

SEQ ID NO: 15713 - DNA, 26 bp, Homo sapiens
ggcgttcagtgattgtcgctgggcac

SEQ ID NO: 15714 - DNA, 26 bp, Homo sapiens
gcgttcagtgattgtcgctgggcaca

SEQ ID NO: 15715 - DNA, 26 bp, Homo sapiens
cgttcagtgattgtcgctgggcacag

SEQ ID NO: 15716 - DNA, 26 bp, Homo sapiens
gttcagtgattgtcgctgggcacagg

SEQ ID NO: 15717 - DNA, 26 bp, Homo sapiens
ttcagtgattgtcgctgggcacaggg

SEQ ID NO: 15718 - DNA, 26 bp, Homo sapiens
tcagtgattgtcgctgggcacagggg

SEQ ID NO: 15719 - DNA, 26 bp, Homo sapiens
cagtgattgtcgctgggcacaggggc

SEQ ID NO: 15720 - DNA, 26 bp, Homo sapiens
agtgattgtcgctgggcacaggggcg

SEQ ID NO: 15721 - DNA, 26 bp, Homo sapiens
gtgattgtcgctgggcacaggggcgg

SEQ ID NO: 15722 - DNA, 26 bp, Homo sapiens
tgattgtcgctgggcacaggggcggc

SEQ ID NO: 15723 - DNA, 26 bp, Homo sapiens
gattgtcgctgggcacaggggcggcg

SEQ ID NO: 15724 - DNA, 26 bp, Homo sapiens
attgtcgctgggcacaggggcggcgc

SEQ ID NO: 15725 - DNA, 26 bp, Homo sapiens
ttgtcgctgggcacaggggcggcgct

SEQ ID NO: 15726 - DNA, 26 bp, Homo sapiens
tgtcgctgggcacaggggcggcgctg

SEQ ID NO: 15727 - DNA, 26 bp, Homo sapiens
gtcgctgggcacaggggcggcgctgg

SEQ ID NO: 15728 - DNA, 26 bp, Homo sapiens
tcgctgggcacaggggcggcgctggt

SEQ ID NO: 15729 - DNA, 26 bp, Homo sapiens
cgctgggcacaggggcggcgctggtg

SEQ ID NO: 15730 - DNA, 26 bp, Homo sapiens
gctgggcacaggggcggcgctggtgc

SEQ ID NO: 15731 - DNA, 26 bp, Homo sapiens
ctgggcacaggggcggcgctggtgcc

SEQ ID NO: 15732 - DNA, 26 bp, Homo sapiens
tgggcacaggggcggcgctggtgccc

SEQ ID NO: 15733 - DNA, 26 bp, Homo sapiens
gggcacaggggcggcgctggtgccca

SEQ ID NO: 15734 - DNA, 26 bp, Homo sapiens
ggcacaggggcggcgctggtgcccac

SEQ ID NO: 15735 - DNA, 26 bp, Homo sapiens
gcacaggggcggcgctggtgcccacg

SEQ ID NO: 15736 - DNA, 26 bp, Homo sapiens
cacaggggcggcgctggtgcccacgg

SEQ ID NO: 15737 - DNA, 26 bp, Homo sapiens
acaggggcggcgctggtgcccacggc

SEQ ID NO: 15738 - DNA, 26 bp, Homo sapiens
caggggcggcgctggtgcccacggca

SEQ ID NO: 15739 - DNA, 26 bp, Homo sapiens
aggggcggcgctggtgcccacggcag

SEQ ID NO: 15740 - DNA, 26 bp, Homo sapiens
ggggcggcgctggtgcccacggcagc

SEQ ID NO: 15741 - DNA, 26 bp, Homo sapiens
gggcggcgctggtgcccacggcagcc

SEQ ID NO: 15742 - DNA, 26 bp, Homo sapiens
ggcggcgctggtgcccacggcagcct

SEQ ID NO: 15743 - DNA, 26 bp, Homo sapiens
gcggcgctggtgcccacggcagcctg

SEQ ID NO: 15744 - DNA, 26 bp, Homo sapiens
cggcgctggtgcccacggcagcctgc

SEQ ID NO: 15745 - DNA, 26 bp, Homo sapiens
ggcgctggtgcccacggcagcctgca

SEQ ID NO: 15746 - DNA, 26 bp, Homo sapiens
gcgctggtgcccacggcagcctgcac

SEQ ID NO: 15747 - DNA, 26 bp, Homo sapiens
cgctggtgcccacggcagcctgcacc

SEQ ID NO: 15748 - DNA, 26 bp, Homo sapiens
gctggtgcccacggcagcctgcacct

SEQ ID NO: 15749 - DNA, 26 bp, Homo sapiens
ctggtgcccacggcagcctgcacctt

SEQ ID NO: 15750 - DNA, 26 bp, Homo sapiens
tggtgcccacggcagcctgcaccttc

SEQ ID NO: 15751 - DNA, 26 bp, Homo sapiens
ggtgcccacggcagcctgcaccttct

SEQ ID NO: 15752 - DNA, 26 bp, Homo sapiens
gtgcccacggcagcctgcaccttctc

SEQ ID NO: 15753 - DNA, 26 bp, Homo sapiens
tgcccacggcagcctgcaccttctcc

SEQ ID NO: 15754 - DNA, 26 bp, Homo sapiens
gcccacggcagcctgcaccttctcca

SEQ ID NO: 15755 - DNA, 26 bp, Homo sapiens
cccacggcagcctgcaccttctccac

SEQ ID NO: 15756 - DNA, 26 bp, Homo sapiens
ccacggcagcctgcaccttctccacc

SEQ ID NO: 15757 - DNA, 26 bp, Homo sapiens
cacggcagcctgcaccttctccacca

SEQ ID NO: 15758 - DNA, 26 bp, Homo sapiens
acggcagcctgcaccttctccaccag

SEQ ID NO: 15759 - DNA, 26 bp, Homo sapiens
cggcagcctgcaccttctccaccagc

SEQ ID NO: 15760 - DNA, 26 bp, Homo sapiens
ggcagcctgcaccttctccaccagcc

SEQ ID NO: 15761 - DNA, 26 bp, Homo sapiens
gcagcctgcaccttctccaccagccc

SEQ ID NO: 15762 - DNA, 26 bp, Homo sapiens
cagcctgcaccttctccaccagcccg

SEQ ID NO: 15763 - DNA, 26 bp, Homo sapiens
agcctgcaccttctccaccagcccgg

SEQ ID NO: 15764 - DNA, 26 bp, Homo sapiens
gcctgcaccttctccaccagcccggc

SEQ ID NO: 15765 - DNA, 26 bp, Homo sapiens
cctgcaccttctccaccagcccggcc

SEQ ID NO: 15766 - DNA, 26 bp, Homo sapiens
ctgcaccttctccaccagcccggccc

SEQ ID NO: 15767 - DNA, 26 bp, Homo sapiens
tgcaccttctccaccagcccggccca

SEQ ID NO: 15768 - DNA, 26 bp, Homo sapiens
gcaccttctccaccagcccggcccac

SEQ ID NO: 15769 - DNA, 26 bp, Homo sapiens
caccttctccaccagcccggcccact

SEQ ID NO: 15770 - DNA, 26 bp, Homo sapiens
accttctccaccagcccggcccactg

SEQ ID NO: 15771 - DNA, 26 bp, Homo sapiens
ccttctccaccagcccggcccactgg

SEQ ID NO: 15772 - DNA, 26 bp, Homo sapiens
cttctccaccagcccggcccactggc

SEQ ID NO: 15773 - DNA, 26 bp, Homo sapiens
ttctccaccagcccggcccactggcg

SEQ ID NO: 15774 - DNA, 26 bp, Homo sapiens
tctccaccagcccggcccactggcgc

SEQ ID NO: 15775 - DNA, 26 bp, Homo sapiens
ctccaccagcccggcccactggcgct

SEQ ID NO: 15776 - DNA, 26 bp, Homo sapiens
tccaccagcccggcccactggcgctg

SEQ ID NO: 15777 - DNA, 26 bp, Homo sapiens
ccaccagcccggcccactggcgctgc

SEQ ID NO: 15778 - DNA, 26 bp, Homo sapiens
caccagcccggcccactggcgctgca

SEQ ID NO: 15779 - DNA, 26 bp, Homo sapiens
accagcccggcccactggcgctgcat

SEQ ID NO: 15780 - DNA, 26 bp, Homo sapiens
ccagcccggcccactggcgctgcatg

SEQ ID NO: 15781 - DNA, 26 bp, Homo sapiens
cagcccggcccactggcgctgcatgt

SEQ ID NO: 15782 - DNA, 26 bp, Homo sapiens
agcccggcccactggcgctgcatgtc

SEQ ID NO: 15783 - DNA, 26 bp, Homo sapiens
gcccggcccactggcgctgcatgtct

SEQ ID NO: 15784 - DNA, 26 bp, Homo sapiens
cccggcccactggcgctgcatgtctt

SEQ ID NO: 15785 - DNA, 26 bp, Homo sapiens
ccggcccactggcgctgcatgtcttc

SEQ ID NO: 15786 - DNA, 26 bp, Homo sapiens
cggcccactggcgctgcatgtcttcc

SEQ ID NO: 15787 - DNA, 26 bp, Homo sapiens
ggcccactggcgctgcatgtcttcca

SEQ ID NO: 15788 - DNA, 26 bp, Homo sapiens
gcccactggcgctgcatgtcttccac

SEQ ID NO: 15789 - DNA, 26 bp, Homo sapiens
cccactggcgctgcatgtcttccacc

SEQ ID NO: 15790 - DNA, 26 bp, Homo sapiens
ccactggcgctgcatgtcttccacca

SEQ ID NO: 15791 - DNA, 26 bp, Homo sapiens
cactggcgctgcatgtcttccaccag

SEQ ID NO: 15792 - DNA, 26 bp, Homo sapiens
actggcgctgcatgtcttccaccagg

SEQ ID NO: 15793 - DNA, 26 bp, Homo sapiens
ctggcgctgcatgtcttccaccaggg

SEQ ID NO: 15794 - DNA, 26 bp, Homo sapiens
tggcgctgcatgtcttccaccagggg

SEQ ID NO: 15795 - DNA, 26 bp, Homo sapiens
ggcgctgcatgtcttccaccaggggc

SEQ ID NO: 15796 - DNA, 26 bp, Homo sapiens
gcgctgcatgtcttccaccaggggct

SEQ ID NO: 15797 - DNA, 26 bp, Homo sapiens
cgctgcatgtcttccaccaggggctc

SEQ ID NO: 15798 - DNA, 26 bp, Homo sapiens
gctgcatgtcttccaccaggggctcg

SEQ ID NO: 15799 - DNA, 26 bp, Homo sapiens
ctgcatgtcttccaccaggggctcga

SEQ ID NO: 15800 - DNA, 26 bp, Homo sapiens
tgcatgtcttccaccaggggctcgaa

SEQ ID NO: 15801 - DNA, 26 bp, Homo sapiens
gcatgtcttccaccaggggctcgaac

SEQ ID NO: 15802 - DNA, 26 bp, Homo sapiens
catgtcttccaccaggggctcgaacc

SEQ ID NO: 15803 - DNA, 26 bp, Homo sapiens
atgtcttccaccaggggctcgaacca

SEQ ID NO: 15804 - DNA, 26 bp, Homo sapiens
tgtcttccaccaggggctcgaaccag

SEQ ID NO: 15805 - DNA, 26 bp, Homo sapiens
gtcttccaccaggggctcgaaccagc

SEQ ID NO: 15806 - DNA, 26 bp, Homo sapiens
tcttccaccaggggctcgaaccagct

SEQ ID NO: 15807 - DNA, 26 bp, Homo sapiens
cttccaccaggggctcgaaccagctc

SEQ ID NO: 15808 - DNA, 26 bp, Homo sapiens
ttccaccaggggctcgaaccagctct

SEQ ID NO: 15809 - DNA, 26 bp, Homo sapiens
tccaccaggggctcgaaccagctctt

SEQ ID NO: 15810 - DNA, 26 bp, Homo sapiens
ccaccaggggctcgaaccagctcttg

SEQ ID NO: 15811 - DNA, 26 bp, Homo sapiens
caccaggggctcgaaccagctcttga

SEQ ID NO: 15812 - DNA, 26 bp, Homo sapiens
accaggggctcgaaccagctcttgag

SEQ ID NO: 15813 - DNA, 26 bp, Homo sapiens
ccaggggctcgaaccagctcttgagg

SEQ ID NO: 15814 - DNA, 26 bp, Homo sapiens
caggggctcgaaccagctcttgaggc

SEQ ID NO: 15815 - DNA, 26 bp, Homo sapiens
aggggctcgaaccagctcttgaggcg

SEQ ID NO: 15816 - DNA, 26 bp, Homo sapiens
ggggctcgaaccagctcttgaggcgg

SEQ ID NO: 15817 - DNA, 26 bp, Homo sapiens
gggctcgaaccagctcttgaggcggg

SEQ ID NO: 15818 - DNA, 26 bp, Homo sapiens
ggctcgaaccagctcttgaggcgggc

SEQ ID NO: 15819 - DNA, 26 bp, Homo sapiens
gctcgaaccagctcttgaggcgggcc

SEQ ID NO: 15820 - DNA, 26 bp, Homo sapiens
ctcgaaccagctcttgaggcgggcct

SEQ ID NO: 15821 - DNA, 26 bp, Homo sapiens
tcgaaccagctcttgaggcgggcctg

SEQ ID NO: 15822 - DNA, 26 bp, Homo sapiens
cgaaccagctcttgaggcgggcctgg

SEQ ID NO: 15823 - DNA, 26 bp, Homo sapiens
gaaccagctcttgaggcgggcctgga

SEQ ID NO: 15824 - DNA, 26 bp, Homo sapiens
aaccagctcttgaggcgggcctggaa

SEQ ID NO: 15825 - DNA, 26 bp, Homo sapiens
accagctcttgaggcgggcctggaag

SEQ ID NO: 15826 - DNA, 26 bp, Homo sapiens
ccagctcttgaggcgggcctggaagg

SEQ ID NO: 15827 - DNA, 26 bp, Homo sapiens
cagctcttgaggcgggcctggaaggc

SEQ ID NO: 15828 - DNA, 26 bp, Homo sapiens
agctcttgaggcgggcctggaaggcc

SEQ ID NO: 15829 - DNA, 26 bp, Homo sapiens
gctcttgaggcgggcctggaaggcct

SEQ ID NO: 15830 - DNA, 26 bp, Homo sapiens
ctcttgaggcgggcctggaaggcctc

SEQ ID NO: 15831 - DNA, 26 bp, Homo sapiens
tcttgaggcgggcctggaaggcctcg

SEQ ID NO: 15832 - DNA, 26 bp, Homo sapiens
cttgaggcgggcctggaaggcctcgg

SEQ ID NO: 15833 - DNA, 26 bp, Homo sapiens
ttgaggcgggcctggaaggcctcggc

SEQ ID NO: 15834 - DNA, 26 bp, Homo sapiens
tgaggcgggcctggaaggcctcggcc

SEQ ID NO: 15835 - DNA, 26 bp, Homo sapiens
gaggcgggcctggaaggcctcggcct

SEQ ID NO: 15836 - DNA, 26 bp, Homo sapiens
aggcgggcctggaaggcctcggcctg

SEQ ID NO: 15837 - DNA, 26 bp, Homo sapiens
ggcgggcctggaaggcctcggcctgc

SEQ ID NO: 15838 - DNA, 26 bp, Homo sapiens
gcgggcctggaaggcctcggcctgca

SEQ ID NO: 15839 - DNA, 26 bp, Homo sapiens
cgggcctggaaggcctcggcctgcag

SEQ ID NO: 15840 - DNA, 26 bp, Homo sapiens
gggcctggaaggcctcggcctgcagg

SEQ ID NO: 15841 - DNA, 26 bp, Homo sapiens
ggcctggaaggcctcggcctgcaggc

SEQ ID NO: 15842 - DNA, 26 bp, Homo sapiens
gcctggaaggcctcggcctgcaggcg

SEQ ID NO: 15843 - DNA, 26 bp, Homo sapiens
cctggaaggcctcggcctgcaggcgt

SEQ ID NO: 15844 - DNA, 26 bp, Homo sapiens
ctggaaggcctcggcctgcaggcgta

SEQ ID NO: 15845 - DNA, 26 bp, Homo sapiens
tggaaggcctcggcctgcaggcgtat

SEQ ID NO: 15846 - DNA, 26 bp, Homo sapiens
ggaaggcctcggcctgcaggcgtatc

SEQ ID NO: 15847 - DNA, 26 bp, Homo sapiens
gaaggcctcggcctgcaggcgtatct

SEQ ID NO: 15848 - DNA, 26 bp, Homo sapiens
aaggcctcggcctgcaggcgtatctg

SEQ ID NO: 15849 - DNA, 26 bp, Homo sapiens
aggcctcggcctgcaggcgtatctgc

SEQ ID NO: 15850 - DNA, 26 bp, Homo sapiens
ggcctcggcctgcaggcgtatctgct

SEQ ID NO: 15851 - DNA, 26 bp, Homo sapiens
gcctcggcctgcaggcgtatctgctg

SEQ ID NO: 15852 - DNA, 26 bp, Homo sapiens
cctcggcctgcaggcgtatctgctgg

SEQ ID NO: 15853 - DNA, 26 bp, Homo sapiens
ctcggcctgcaggcgtatctgctggg

SEQ ID NO: 15854 - DNA, 26 bp, Homo sapiens
tcggcctgcaggcgtatctgctgggc

SEQ ID NO: 15855 - DNA, 26 bp, Homo sapiens
cggcctgcaggcgtatctgctgggcc

SEQ ID NO: 15856 - DNA, 26 bp, Homo sapiens
ggcctgcaggcgtatctgctgggcct

SEQ ID NO: 15857 - DNA, 26 bp, Homo sapiens
gcctgcaggcgtatctgctgggcctg

SEQ ID NO: 15858 - DNA, 26 bp, Homo sapiens
cctgcaggcgtatctgctgggcctgc

SEQ ID NO: 15859 - DNA, 26 bp, Homo sapiens
ctgcaggcgtatctgctgggcctgct

SEQ ID NO: 15860 - DNA, 26 bp, Homo sapiens
tgcaggcgtatctgctgggcctgctc

SEQ ID NO: 15861 - DNA, 26 bp, Homo sapiens
gcaggcgtatctgctgggcctgctcc

SEQ ID NO: 15862 - DNA, 26 bp, Homo sapiens
caggcgtatctgctgggcctgctcct

SEQ ID NO: 15863 - DNA, 26 bp, Homo sapiens
aggcgtatctgctgggcctgctcctc

SEQ ID NO: 15864 - DNA, 26 bp, Homo sapiens
ggcgtatctgctgggcctgctcctcc

SEQ ID NO: 15865 - DNA, 26 bp, Homo sapiens
gcgtatctgctgggcctgctcctcca

SEQ ID NO: 15866 - DNA, 26 bp, Homo sapiens
cgtatctgctgggcctgctcctccag

SEQ ID NO: 15867 - DNA, 26 bp, Homo sapiens
gtatctgctgggcctgctcctccagc

SEQ ID NO: 15868 - DNA, 26 bp, Homo sapiens
tatctgctgggcctgctcctccagct

SEQ ID NO: 15869 - DNA, 26 bp, Homo sapiens
atctgctgggcctgctcctccagctt

SEQ ID NO: 15870 - DNA, 26 bp, Homo sapiens
tctgctgggcctgctcctccagcttg

SEQ ID NO: 15871 - DNA, 26 bp, Homo sapiens
ctgctgggcctgctcctccagcttgg

SEQ ID NO: 15872 - DNA, 26 bp, Homo sapiens
tgctgggcctgctcctccagcttggc

SEQ ID NO: 15873 - DNA, 26 bp, Homo sapiens
gctgggcctgctcctccagcttggcg

SEQ ID NO: 15874 - DNA, 26 bp, Homo sapiens
ctgggcctgctcctccagcttggcgc

SEQ ID NO: 15875 - DNA, 26 bp, Homo sapiens
tgggcctgctcctccagcttggcgcg

SEQ ID NO: 15876 - DNA, 26 bp, Homo sapiens
gggcctgctcctccagcttggcgcgc

SEQ ID NO: 15877 - DNA, 26 bp, Homo sapiens
ggcctgctcctccagcttggcgcgca

SEQ ID NO: 15878 - DNA, 26 bp, Homo sapiens
gcctgctcctccagcttggcgcgcac

SEQ ID NO: 15879 - DNA, 26 bp, Homo sapiens
cctgctcctccagcttggcgcgcacc

SEQ ID NO: 15880 - DNA, 26 bp, Homo sapiens
ctgctcctccagcttggcgcgcacct

SEQ ID NO: 15881 - DNA, 26 bp, Homo sapiens
tgctcctccagcttggcgcgcacctc

SEQ ID NO: 15882 - DNA, 26 bp, Homo sapiens
gctcctccagcttggcgcgcacctcc

SEQ ID NO: 15883 - DNA, 26 bp, Homo sapiens
ctcctccagcttggcgcgcacctccg

SEQ ID NO: 15884 - DNA, 26 bp, Homo sapiens
tcctccagcttggcgcgcacctccgc

SEQ ID NO: 15885 - DNA, 26 bp, Homo sapiens
cctccagcttggcgcgcacctccgcc

SEQ ID NO: 15886 - DNA, 26 bp, Homo sapiens
ctccagcttggcgcgcacctccgcca

SEQ ID NO: 15887 - DNA, 26 bp, Homo sapiens
tccagcttggcgcgcacctccgccac

SEQ ID NO: 15888 - DNA, 26 bp, Homo sapiens
ccagcttggcgcgcacctccgccacc

SEQ ID NO: 15889 - DNA, 26 bp, Homo sapiens
cagcttggcgcgcacctccgccacct

SEQ ID NO: 15890 - DNA, 26 bp, Homo sapiens
agcttggcgcgcacctccgccacctg

SEQ ID NO: 15891 - DNA, 26 bp, Homo sapiens
gcttggcgcgcacctccgccacctgc

SEQ ID NO: 15892 - DNA, 26 bp, Homo sapiens
cttggcgcgcacctccgccacctgct

SEQ ID NO: 15893 - DNA, 26 bp, Homo sapiens
ttggcgcgcacctccgccacctgctc

SEQ ID NO: 15894 - DNA, 26 bp, Homo sapiens
tggcgcgcacctccgccacctgctcc

SEQ ID NO: 15895 - DNA, 26 bp, Homo sapiens
ggcgcgcacctccgccacctgctcct

SEQ ID NO: 15896 - DNA, 26 bp, Homo sapiens
gcgcgcacctccgccacctgctcctt

SEQ ID NO: 15897 - DNA, 26 bp, Homo sapiens
cgcgcacctccgccacctgctccttc

SEQ ID NO: 15898 - DNA, 26 bp, Homo sapiens
gcgcacctccgccacctgctccttca

SEQ ID NO: 15899 - DNA, 26 bp, Homo sapiens
cgcacctccgccacctgctccttcac

SEQ ID NO: 15900 - DNA, 26 bp, Homo sapiens
gcacctccgccacctgctccttcacc

SEQ ID NO: 15901 - DNA, 26 bp, Homo sapiens
cacctccgccacctgctccttcacct

SEQ ID NO: 15902 - DNA, 26 bp, Homo sapiens
acctccgccacctgctccttcacctc

SEQ ID NO: 15903 - DNA, 26 bp, Homo sapiens
cctccgccacctgctccttcacctcg

SEQ ID NO: 15904 - DNA, 26 bp, Homo sapiens
ctccgccacctgctccttcacctcgt

SEQ ID NO: 15905 - DNA, 26 bp, Homo sapiens
tccgccacctgctccttcacctcgtc

SEQ ID NO: 15906 - DNA, 26 bp, Homo sapiens
ccgccacctgctccttcacctcgtcc

SEQ ID NO: 15907 - DNA, 26 bp, Homo sapiens
cgccacctgctccttcacctcgtcca

SEQ ID NO: 15908 - DNA, 26 bp, Homo sapiens
gccacctgctccttcacctcgtccag

SEQ ID NO: 15909 - DNA, 26 bp, Homo sapiens
ccacctgctccttcacctcgtccagg

SEQ ID NO: 15910 - DNA, 26 bp, Homo sapiens
cacctgctccttcacctcgtccaggc

SEQ ID NO: 15911 - DNA, 26 bp, Homo sapiens
acctgctccttcacctcgtccaggcg

SEQ ID NO: 15912 - DNA, 26 bp, Homo sapiens
cctgctccttcacctcgtccaggcgg

SEQ ID NO: 15913 - DNA, 26 bp, Homo sapiens
ctgctccttcacctcgtccaggcggt

SEQ ID NO: 15914 - DNA, 26 bp, Homo sapiens
tgctccttcacctcgtccaggcggtc

SEQ ID NO: 15915 - DNA, 26 bp, Homo sapiens
gctccttcacctcgtccaggcggtcg

SEQ ID NO: 15916 - DNA, 26 bp, Homo sapiens
ctccttcacctcgtccaggcggtcgc

SEQ ID NO: 15917 - DNA, 26 bp, Homo sapiens
tccttcacctcgtccaggcggtcgcg

SEQ ID NO: 15918 - DNA, 26 bp, Homo sapiens
ccttcacctcgtccaggcggtcgcgg

SEQ ID NO: 15919 - DNA, 26 bp, Homo sapiens
cttcacctcgtccaggcggtcgcggg

SEQ ID NO: 15920 - DNA, 26 bp, Homo sapiens
ttcacctcgtccaggcggtcgcgggt

SEQ ID NO: 15921 - DNA, 26 bp, Homo sapiens
tcacctcgtccaggcggtcgcgggtc

SEQ ID NO: 15922 - DNA, 26 bp, Homo sapiens
cacctcgtccaggcggtcgcgggtcc

SEQ ID NO: 15923 - DNA, 26 bp, Homo sapiens
acctcgtccaggcggtcgcgggtccg

SEQ ID NO: 15924 - DNA, 26 bp, Homo sapiens
cctcgtccaggcggtcgcgggtccgg

SEQ ID NO: 15925 - DNA, 26 bp, Homo sapiens
ctcgtccaggcggtcgcgggtccggc

SEQ ID NO: 15926 - DNA, 26 bp, Homo sapiens
tcgtccaggcggtcgcgggtccggct

SEQ ID NO: 15927 - DNA, 26 bp, Homo sapiens
cgtccaggcggtcgcgggtccggctg

SEQ ID NO: 15928 - DNA, 26 bp, Homo sapiens
gtccaggcggtcgcgggtccggctgc

SEQ ID NO: 15929 - DNA, 26 bp, Homo sapiens
tccaggcggtcgcgggtccggctgcc

SEQ ID NO: 15930 - DNA, 26 bp, Homo sapiens
ccaggcggtcgcgggtccggctgccc

SEQ ID NO: 15931 - DNA, 26 bp, Homo sapiens
caggcggtcgcgggtccggctgccca

SEQ ID NO: 15932 - DNA, 26 bp, Homo sapiens
aggcggtcgcgggtccggctgcccat

SEQ ID NO: 15933 - DNA, 26 bp, Homo sapiens
ggcggtcgcgggtccggctgcccatc

SEQ ID NO: 15934 - DNA, 26 bp, Homo sapiens
gcggtcgcgggtccggctgcccatct

SEQ ID NO: 15935 - DNA, 26 bp, Homo sapiens
cggtcgcgggtccggctgcccatctc

SEQ ID NO: 15936 - DNA, 26 bp, Homo sapiens
ggtcgcgggtccggctgcccatctcc

SEQ ID NO: 15937 - DNA, 26 bp, Homo sapiens
gtcgcgggtccggctgcccatctcct

SEQ ID NO: 15938 - DNA, 26 bp, Homo sapiens
tcgcgggtccggctgcccatctcctc

SEQ ID NO: 15939 - DNA, 26 bp, Homo sapiens
cgcgggtccggctgcccatctcctcc

SEQ ID NO: 15940 - DNA, 26 bp, Homo sapiens
gcgggtccggctgcccatctcctcca

SEQ ID NO: 15941 - DNA, 26 bp, Homo sapiens
cgggtccggctgcccatctcctccat

SEQ ID NO: 15942 - DNA, 26 bp, Homo sapiens
gggtccggctgcccatctcctccatc

SEQ ID NO: 15943 - DNA, 26 bp, Homo sapiens
ggtccggctgcccatctcctccatcc

SEQ ID NO: 15944 - DNA, 26 bp, Homo sapiens
gtccggctgcccatctcctccatccg

SEQ ID NO: 15945 - DNA, 26 bp, Homo sapiens
tccggctgcccatctcctccatccgc

SEQ ID NO: 15946 - DNA, 26 bp, Homo sapiens
ccggctgcccatctcctccatccgcg

SEQ ID NO: 15947 - DNA, 26 bp, Homo sapiens
cggctgcccatctcctccatccgcgc

SEQ ID NO: 15948 - DNA, 26 bp, Homo sapiens
ggctgcccatctcctccatccgcgcg

SEQ ID NO: 15949 - DNA, 26 bp, Homo sapiens
gctgcccatctcctccatccgcgcgc

SEQ ID NO: 15950 - DNA, 26 bp, Homo sapiens
ctgcccatctcctccatccgcgcgcg

SEQ ID NO: 15951 - DNA, 26 bp, Homo sapiens
tgcccatctcctccatccgcgcgcgc

SEQ ID NO: 15952 - DNA, 26 bp, Homo sapiens
gcccatctcctccatccgcgcgcgca

SEQ ID NO: 15953 - DNA, 26 bp, Homo sapiens
cccatctcctccatccgcgcgcgcag

SEQ ID NO: 15954 - DNA, 26 bp, Homo sapiens
ccatctcctccatccgcgcgcgcagc

SEQ ID NO: 15955 - DNA, 26 bp, Homo sapiens
catctcctccatccgcgcgcgcagcc

SEQ ID NO: 15956 - DNA, 26 bp, Homo sapiens
atctcctccatccgcgcgcgcagccg

SEQ ID NO: 15957 - DNA, 26 bp, Homo sapiens
tctcctccatccgcgcgcgcagccgc

SEQ ID NO: 15958 - DNA, 26 bp, Homo sapiens
ctcctccatccgcgcgcgcagccgct

SEQ ID NO: 15959 - DNA, 26 bp, Homo sapiens
tcctccatccgcgcgcgcagccgctc

SEQ ID NO: 15960 - DNA, 26 bp, Homo sapiens
cctccatccgcgcgcgcagccgctcg

SEQ ID NO: 15961 - DNA, 26 bp, Homo sapiens
ctccatccgcgcgcgcagccgctcgc

SEQ ID NO: 15962 - DNA, 26 bp, Homo sapiens
tccatccgcgcgcgcagccgctcgcc

SEQ ID NO: 15963 - DNA, 26 bp, Homo sapiens
ccatccgcgcgcgcagccgctcgccc

SEQ ID NO: 15964 - DNA, 26 bp, Homo sapiens
catccgcgcgcgcagccgctcgcccc

SEQ ID NO: 15965 - DNA, 26 bp, Homo sapiens
atccgcgcgcgcagccgctcgcccca

SEQ ID NO: 15966 - DNA, 26 bp, Homo sapiens
tccgcgcgcgcagccgctcgccccag

SEQ ID NO: 15967 - DNA, 26 bp, Homo sapiens
ccgcgcgcgcagccgctcgccccagg

SEQ ID NO: 15968 - DNA, 26 bp, Homo sapiens
cgcgcgcgcagccgctcgccccaggc

SEQ ID NO: 15969 - DNA, 26 bp, Homo sapiens
gcgcgcgcagccgctcgccccaggcc

SEQ ID NO: 15970 - DNA, 26 bp, Homo sapiens
cgcgcgcagccgctcgccccaggcct

SEQ ID NO: 15971 - DNA, 26 bp, Homo sapiens
gcgcgcagccgctcgccccaggcctg

SEQ ID NO: 15972 - DNA, 26 bp, Homo sapiens
cgcgcagccgctcgccccaggcctgg

SEQ ID NO: 15973 - DNA, 26 bp, Homo sapiens
gcgcagccgctcgccccaggcctggg

SEQ ID NO: 15974 - DNA, 26 bp, Homo sapiens
cgcagccgctcgccccaggcctgggc

SEQ ID NO: 15975 - DNA, 26 bp, Homo sapiens
gcagccgctcgccccaggcctgggcc

SEQ ID NO: 15976 - DNA, 26 bp, Homo sapiens
cagccgctcgccccaggcctgggccc

SEQ ID NO: 15977 - DNA, 26 bp, Homo sapiens
agccgctcgccccaggcctgggcccg

SEQ ID NO: 15978 - DNA, 26 bp, Homo sapiens
gccgctcgccccaggcctgggcccgc

SEQ ID NO: 15979 - DNA, 26 bp, Homo sapiens
ccgctcgccccaggcctgggcccgct

SEQ ID NO: 15980 - DNA, 26 bp, Homo sapiens
cgctcgccccaggcctgggcccgctc

SEQ ID NO: 15981 - DNA, 26 bp, Homo sapiens
gctcgccccaggcctgggcccgctcc

SEQ ID NO: 15982 - DNA, 26 bp, Homo sapiens
ctcgccccaggcctgggcccgctcct

SEQ ID NO: 15983 - DNA, 26 bp, Homo sapiens
tcgccccaggcctgggcccgctcctg

SEQ ID NO: 15984 - DNA, 26 bp, Homo sapiens
cgccccaggcctgggcccgctcctgt

SEQ ID NO: 15985 - DNA, 26 bp, Homo sapiens
gccccaggcctgggcccgctcctgta

SEQ ID NO: 15986 - DNA, 26 bp, Homo sapiens
ccccaggcctgggcccgctcctgtag

SEQ ID NO: 15987 - DNA, 26 bp, Homo sapiens
cccaggcctgggcccgctcctgtagc

SEQ ID NO: 15988 - DNA, 26 bp, Homo sapiens
ccaggcctgggcccgctcctgtagcg

SEQ ID NO: 15989 - DNA, 26 bp, Homo sapiens
caggcctgggcccgctcctgtagcgg

SEQ ID NO: 15990 - DNA, 26 bp, Homo sapiens
aggcctgggcccgctcctgtagcggc

SEQ ID NO: 15991 - DNA, 26 bp, Homo sapiens
ggcctgggcccgctcctgtagcggct

SEQ ID NO: 15992 - DNA, 26 bp, Homo sapiens
gcctgggcccgctcctgtagcggctg

SEQ ID NO: 15993 - DNA, 26 bp, Homo sapiens
cctgggcccgctcctgtagcggctgg

SEQ ID NO: 15994 - DNA, 26 bp, Homo sapiens
ctgggcccgctcctgtagcggctggc

SEQ ID NO: 15995 - DNA, 26 bp, Homo sapiens
tgggcccgctcctgtagcggctggcc

SEQ ID NO: 15996 - DNA, 26 bp, Homo sapiens
gggcccgctcctgtagcggctggccg

SEQ ID NO: 15997 - DNA, 26 bp, Homo sapiens
ggcccgctcctgtagcggctggccgg

SEQ ID NO: 15998 - DNA, 26 bp, Homo sapiens
gcccgctcctgtagcggctggccggc

SEQ ID NO: 15999 - DNA, 26 bp, Homo sapiens
cccgctcctgtagcggctggccggcc

SEQ ID NO: 16000 - DNA, 26 bp, Homo sapiens
ccgctcctgtagcggctggccggcca

SEQ ID NO: 16001 - DNA, 26 bp, Homo sapiens
cgctcctgtagcggctggccggccag

SEQ ID NO: 16002 - DNA, 26 bp, Homo sapiens
gctcctgtagcggctggccggccagg

SEQ ID NO: 16003 - DNA, 26 bp, Homo sapiens
ctcctgtagcggctggccggccaggg

SEQ ID NO: 16004 - DNA, 26 bp, Homo sapiens
tcctgtagcggctggccggccaggga

SEQ ID NO: 16005 - DNA, 26 bp, Homo sapiens
cctgtagcggctggccggccagggag

SEQ ID NO: 16006 - DNA, 26 bp, Homo sapiens
ctgtagcggctggccggccagggagc

SEQ ID NO: 16007 - DNA, 26 bp, Homo sapiens
tgtagcggctggccggccagggagcc

SEQ ID NO: 16008 - DNA, 26 bp, Homo sapiens
gtagcggctggccggccagggagccc

SEQ ID NO: 16009 - DNA, 26 bp, Homo sapiens
tagcggctggccggccagggagccca

SEQ ID NO: 16010 - DNA, 26 bp, Homo sapiens
agcggctggccggccagggagcccac

SEQ ID NO: 16011 - DNA, 26 bp, Homo sapiens
gcggctggccggccagggagcccaca

SEQ ID NO: 16012 - DNA, 26 bp, Homo sapiens
cggctggccggccagggagcccacag

SEQ ID NO: 16013 - DNA, 26 bp, Homo sapiens
ggctggccggccagggagcccacagt

SEQ ID NO: 16014 - DNA, 26 bp, Homo sapiens
gctggccggccagggagcccacagtg

SEQ ID NO: 16015 - DNA, 26 bp, Homo sapiens
ctggccggccagggagcccacagtgg

SEQ ID NO: 16016 - DNA, 26 bp, Homo sapiens
tggccggccagggagcccacagtggc

SEQ ID NO: 16017 - DNA, 26 bp, Homo sapiens
ggccggccagggagcccacagtggcg

SEQ ID NO: 16018 - DNA, 26 bp, Homo sapiens
gccggccagggagcccacagtggcgg

SEQ ID NO: 16019 - DNA, 26 bp, Homo sapiens
ccggccagggagcccacagtggcggc

SEQ ID NO: 16020 - DNA, 26 bp, Homo sapiens
cggccagggagcccacagtggcggcc

SEQ ID NO: 16021 - DNA, 26 bp, Homo sapiens
ggccagggagcccacagtggcggccc

SEQ ID NO: 16022 - DNA, 26 bp, Homo sapiens
gccagggagcccacagtggcggcccg

SEQ ID NO: 16023 - DNA, 26 bp, Homo sapiens
ccagggagcccacagtggcggcccgc

SEQ ID NO: 16024 - DNA, 26 bp, Homo sapiens
cagggagcccacagtggcggcccgca

SEQ ID NO: 16025 - DNA, 26 bp, Homo sapiens
agggagcccacagtggcggcccgcac

SEQ ID NO: 16026 - DNA, 26 bp, Homo sapiens
gggagcccacagtggcggcccgcacg

SEQ ID NO: 16027 - DNA, 26 bp, Homo sapiens
ggagcccacagtggcggcccgcacgc

SEQ ID NO: 16028 - DNA, 26 bp, Homo sapiens
gagcccacagtggcggcccgcacgcg

SEQ ID NO: 16029 - DNA, 26 bp, Homo sapiens
agcccacagtggcggcccgcacgcgg

SEQ ID NO: 16030 - DNA, 26 bp, Homo sapiens
gcccacagtggcggcccgcacgcggc

SEQ ID NO: 16031 - DNA, 26 bp, Homo sapiens
cccacagtggcggcccgcacgcggcc

SEQ ID NO: 16032 - DNA, 26 bp, Homo sapiens
ccacagtggcggcccgcacgcggccc

SEQ ID NO: 16033 - DNA, 26 bp, Homo sapiens
cacagtggcggcccgcacgcggccct

SEQ ID NO: 16034 - DNA, 26 bp, Homo sapiens
acagtggcggcccgcacgcggccctg

SEQ ID NO: 16035 - DNA, 26 bp, Homo sapiens
cagtggcggcccgcacgcggccctgt

SEQ ID NO: 16036 - DNA, 26 bp, Homo sapiens
agtggcggcccgcacgcggccctgtt

SEQ ID NO: 16037 - DNA, 26 bp, Homo sapiens
gtggcggcccgcacgcggccctgttc

SEQ ID NO: 16038 - DNA, 26 bp, Homo sapiens
tggcggcccgcacgcggccctgttcc

SEQ ID NO: 16039 - DNA, 26 bp, Homo sapiens
ggcggcccgcacgcggccctgttcca

SEQ ID NO: 16040 - DNA, 26 bp, Homo sapiens
gcggcccgcacgcggccctgttccac

SEQ ID NO: 16041 - DNA, 26 bp, Homo sapiens
cggcccgcacgcggccctgttccacc

SEQ ID NO: 16042 - DNA, 26 bp, Homo sapiens
ggcccgcacgcggccctgttccacca

SEQ ID NO: 16043 - DNA, 26 bp, Homo sapiens
gcccgcacgcggccctgttccaccag

SEQ ID NO: 16044 - DNA, 26 bp, Homo sapiens
cccgcacgcggccctgttccaccagg

SEQ ID NO: 16045 - DNA, 26 bp, Homo sapiens
ccgcacgcggccctgttccaccaggg

SEQ ID NO: 16046 - DNA, 26 bp, Homo sapiens
cgcacgcggccctgttccaccagggg

SEQ ID NO: 16047 - DNA, 26 bp, Homo sapiens
gcacgcggccctgttccaccaggggc

SEQ ID NO: 16048 - DNA, 26 bp, Homo sapiens
cacgcggccctgttccaccaggggcc

SEQ ID NO: 16049 - DNA, 26 bp, Homo sapiens
acgcggccctgttccaccaggggccc

SEQ ID NO: 16050 - DNA, 26 bp, Homo sapiens
cgcggccctgttccaccaggggcccc

SEQ ID NO: 16051 - DNA, 26 bp, Homo sapiens
gcggccctgttccaccaggggcccca

SEQ ID NO: 16052 - DNA, 26 bp, Homo sapiens
cggccctgttccaccaggggccccag

SEQ ID NO: 16053 - DNA, 26 bp, Homo sapiens
ggccctgttccaccaggggccccagg

SEQ ID NO: 16054 - DNA, 26 bp, Homo sapiens
gccctgttccaccaggggccccaggc

SEQ ID NO: 16055 - DNA, 26 bp, Homo sapiens
ccctgttccaccaggggccccaggcg

SEQ ID NO: 16056 - DNA, 26 bp, Homo sapiens
cctgttccaccaggggccccaggcgc

SEQ ID NO: 16057 - DNA, 26 bp, Homo sapiens
ctgttccaccaggggccccaggcgct

SEQ ID NO: 16058 - DNA, 26 bp, Homo sapiens
tgttccaccaggggccccaggcgctc

SEQ ID NO: 16059 - DNA, 26 bp, Homo sapiens
gttccaccaggggccccaggcgctcg

SEQ ID NO: 16060 - DNA, 26 bp, Homo sapiens
ttccaccaggggccccaggcgctcgc

SEQ ID NO: 16061 - DNA, 26 bp, Homo sapiens
tccaccaggggccccaggcgctcgcg

SEQ ID NO: 16062 - DNA, 26 bp, Homo sapiens
ccaccaggggccccaggcgctcgcgg

SEQ ID NO: 16063 - DNA, 26 bp, Homo sapiens
caccaggggccccaggcgctcgcgga

SEQ ID NO: 16064 - DNA, 26 bp, Homo sapiens
accaggggccccaggcgctcgcggat

SEQ ID NO: 16065 - DNA, 26 bp, Homo sapiens
ccaggggccccaggcgctcgcggatg

SEQ ID NO: 16066 - DNA, 26 bp, Homo sapiens
caggggccccaggcgctcgcggatgg

SEQ ID NO: 16067 - DNA, 26 bp, Homo sapiens
aggggccccaggcgctcgcggatggc

SEQ ID NO: 16068 - DNA, 26 bp, Homo sapiens
ggggccccaggcgctcgcggatggcg

SEQ ID NO: 16069 - DNA, 26 bp, Homo sapiens
gggccccaggcgctcgcggatggcgc

SEQ ID NO: 16070 - DNA, 26 bp, Homo sapiens
ggccccaggcgctcgcggatggcgct

SEQ ID NO: 16071 - DNA, 26 bp, Homo sapiens
gccccaggcgctcgcggatggcgctg

SEQ ID NO: 16072 - DNA, 26 bp, Homo sapiens
ccccaggcgctcgcggatggcgctga

SEQ ID NO: 16073 - DNA, 26 bp, Homo sapiens
cccaggcgctcgcggatggcgctgag

SEQ ID NO: 16074 - DNA, 26 bp, Homo sapiens
ccaggcgctcgcggatggcgctgagg

SEQ ID NO: 16075 - DNA, 26 bp, Homo sapiens
caggcgctcgcggatggcgctgaggc

SEQ ID NO: 16076 - DNA, 26 bp, Homo sapiens
aggcgctcgcggatggcgctgaggcc

SEQ ID NO: 16077 - DNA, 26 bp, Homo sapiens
ggcgctcgcggatggcgctgaggccg

SEQ ID NO: 16078 - DNA, 26 bp, Homo sapiens
gcgctcgcggatggcgctgaggccgc

SEQ ID NO: 16079 - DNA, 26 bp, Homo sapiens
cgctcgcggatggcgctgaggccgcg

SEQ ID NO: 16080 - DNA, 26 bp, Homo sapiens
gctcgcggatggcgctgaggccgcgc

SEQ ID NO: 16081 - DNA, 26 bp, Homo sapiens
ctcgcggatggcgctgaggccgcgct

SEQ ID NO: 16082 - DNA, 26 bp, Homo sapiens
tcgcggatggcgctgaggccgcgctc

SEQ ID NO: 16083 - DNA, 26 bp, Homo sapiens
cgcggatggcgctgaggccgcgctcg

SEQ ID NO: 16084 - DNA, 26 bp, Homo sapiens
gcggatggcgctgaggccgcgctcgg

SEQ ID NO: 16085 - DNA, 26 bp, Homo sapiens
cggatggcgctgaggccgcgctcggc

SEQ ID NO: 16086 - DNA, 26 bp, Homo sapiens
ggatggcgctgaggccgcgctcggcg

SEQ ID NO: 16087 - DNA, 26 bp, Homo sapiens
gatggcgctgaggccgcgctcggcgc

SEQ ID NO: 16088 - DNA, 26 bp, Homo sapiens
atggcgctgaggccgcgctcggcgcc

SEQ ID NO: 16089 - DNA, 26 bp, Homo sapiens
tggcgctgaggccgcgctcggcgccc

SEQ ID NO: 16090 - DNA, 26 bp, Homo sapiens
ggcgctgaggccgcgctcggcgccct

SEQ ID NO: 16091 - DNA, 26 bp, Homo sapiens
gcgctgaggccgcgctcggcgccctc

SEQ ID NO: 16092 - DNA, 26 bp, Homo sapiens
cgctgaggccgcgctcggcgccctcg

SEQ ID NO: 16093 - DNA, 26 bp, Homo sapiens
gctgaggccgcgctcggcgccctcgc

SEQ ID NO: 16094 - DNA, 26 bp, Homo sapiens
ctgaggccgcgctcggcgccctcgcg

SEQ ID NO: 16095 - DNA, 26 bp, Homo sapiens
tgaggccgcgctcggcgccctcgcgg

SEQ ID NO: 16096 - DNA, 26 bp, Homo sapiens
gaggccgcgctcggcgccctcgcggg

SEQ ID NO: 16097 - DNA, 26 bp, Homo sapiens
aggccgcgctcggcgccctcgcgggc

SEQ ID NO: 16098 - DNA, 26 bp, Homo sapiens
ggccgcgctcggcgccctcgcgggcc

SEQ ID NO: 16099 - DNA, 26 bp, Homo sapiens
gccgcgctcggcgccctcgcgggccc

SEQ ID NO: 16100 - DNA, 26 bp, Homo sapiens
ccgcgctcggcgccctcgcgggcccc

SEQ ID NO: 16101 - DNA, 26 bp, Homo sapiens
cgcgctcggcgccctcgcgggccccg

SEQ ID NO: 16102 - DNA, 26 bp, Homo sapiens
gcgctcggcgccctcgcgggccccgg

SEQ ID NO: 16103 - DNA, 26 bp, Homo sapiens
cgctcggcgccctcgcgggccccggc

SEQ ID NO: 16104 - DNA, 26 bp, Homo sapiens
gctcggcgccctcgcgggccccggcc

SEQ ID NO: 16105 - DNA, 26 bp, Homo sapiens
ctcggcgccctcgcgggccccggcct

SEQ ID NO: 16106 - DNA, 26 bp, Homo sapiens
tcggcgccctcgcgggccccggcctg

SEQ ID NO: 16107 - DNA, 26 bp, Homo sapiens
cggcgccctcgcgggccccggcctgg

SEQ ID NO: 16108 - DNA, 26 bp, Homo sapiens
ggcgccctcgcgggccccggcctggt

SEQ ID NO: 16109 - DNA, 26 bp, Homo sapiens
gcgccctcgcgggccccggcctggta

SEQ ID NO: 16110 - DNA, 26 bp, Homo sapiens
cgccctcgcgggccccggcctggtac

SEQ ID NO: 16111 - DNA, 26 bp, Homo sapiens
gccctcgcgggccccggcctggtaca

SEQ ID NO: 16112 - DNA, 26 bp, Homo sapiens
ccctcgcgggccccggcctggtacac

SEQ ID NO: 16113 - DNA, 26 bp, Homo sapiens
cctcgcgggccccggcctggtacact

SEQ ID NO: 16114 - DNA, 26 bp, Homo sapiens
ctcgcgggccccggcctggtacactg

SEQ ID NO: 16115 - DNA, 26 bp, Homo sapiens
tcgcgggccccggcctggtacactgc

SEQ ID NO: 16116 - DNA, 26 bp, Homo sapiens
cgcgggccccggcctggtacactgcc

SEQ ID NO: 16117 - DNA, 26 bp, Homo sapiens
gcgggccccggcctggtacactgcca

SEQ ID NO: 16118 - DNA, 26 bp, Homo sapiens
cgggccccggcctggtacactgccag

SEQ ID NO: 16119 - DNA, 26 bp, Homo sapiens
gggccccggcctggtacactgccagg

SEQ ID NO: 16120 - DNA, 26 bp, Homo sapiens
ggccccggcctggtacactgccaggc

SEQ ID NO: 16121 - DNA, 26 bp, Homo sapiens
gccccggcctggtacactgccaggcg

SEQ ID NO: 16122 - DNA, 26 bp, Homo sapiens
ccccggcctggtacactgccaggcgc

SEQ ID NO: 16123 - DNA, 26 bp, Homo sapiens
cccggcctggtacactgccaggcgct

SEQ ID NO: 16124 - DNA, 26 bp, Homo sapiens
ccggcctggtacactgccaggcgctt

SEQ ID NO: 16125 - DNA, 26 bp, Homo sapiens
cggcctggtacactgccaggcgcttc

SEQ ID NO: 16126 - DNA, 26 bp, Homo sapiens
ggcctggtacactgccaggcgcttct

SEQ ID NO: 16127 - DNA, 26 bp, Homo sapiens
gcctggtacactgccaggcgcttctg

SEQ ID NO: 16128 - DNA, 26 bp, Homo sapiens
cctggtacactgccaggcgcttctgc

SEQ ID NO: 16129 - DNA, 26 bp, Homo sapiens
ctggtacactgccaggcgcttctgca

SEQ ID NO: 16130 - DNA, 26 bp, Homo sapiens
tggtacactgccaggcgcttctgcag

SEQ ID NO: 16131 - DNA, 26 bp, Homo sapiens
ggtacactgccaggcgcttctgcagg

SEQ ID NO: 16132 - DNA, 26 bp, Homo sapiens
gtacactgccaggcgcttctgcaggt

SEQ ID NO: 16133 - DNA, 26 bp, Homo sapiens
tacactgccaggcgcttctgcaggtc

SEQ ID NO: 16134 - DNA, 26 bp, Homo sapiens
acactgccaggcgcttctgcaggtca

SEQ ID NO: 16135 - DNA, 26 bp, Homo sapiens
cactgccaggcgcttctgcaggtcat

SEQ ID NO: 16136 - DNA, 26 bp, Homo sapiens
actgccaggcgcttctgcaggtcatc

SEQ ID NO: 16137 - DNA, 26 bp, Homo sapiens
ctgccaggcgcttctgcaggtcatcg

SEQ ID NO: 16138 - DNA, 26 bp, Homo sapiens
tgccaggcgcttctgcaggtcatcgg

SEQ ID NO: 16139 - DNA, 26 bp, Homo sapiens
gccaggcgcttctgcaggtcatcggc

SEQ ID NO: 16140 - DNA, 26 bp, Homo sapiens
ccaggcgcttctgcaggtcatcggca

SEQ ID NO: 16141 - DNA, 26 bp, Homo sapiens
caggcgcttctgcaggtcatcggcat

SEQ ID NO: 16142 - DNA, 26 bp, Homo sapiens
aggcgcttctgcaggtcatcggcatc

SEQ ID NO: 16143 - DNA, 26 bp, Homo sapiens
ggcgcttctgcaggtcatcggcatcg

SEQ ID NO: 16144 - DNA, 26 bp, Homo sapiens
gcgcttctgcaggtcatcggcatcgc

SEQ ID NO: 16145 - DNA, 26 bp, Homo sapiens
cgcttctgcaggtcatcggcatcgcg

SEQ ID NO: 16146 - DNA, 26 bp, Homo sapiens
gcttctgcaggtcatcggcatcgcgg

SEQ ID NO: 16147 - DNA, 26 bp, Homo sapiens
cttctgcaggtcatcggcatcgcgga

SEQ ID NO: 16148 - DNA, 26 bp, Homo sapiens
ttctgcaggtcatcggcatcgcggag

SEQ ID NO: 16149 - DNA, 26 bp, Homo sapiens
tctgcaggtcatcggcatcgcggagg

SEQ ID NO: 16150 - DNA, 26 bp, Homo sapiens
ctgcaggtcatcggcatcgcggagga

SEQ ID NO: 16151 - DNA, 26 bp, Homo sapiens
tgcaggtcatcggcatcgcggaggag

SEQ ID NO: 16152 - DNA, 26 bp, Homo sapiens
gcaggtcatcggcatcgcggaggagc

SEQ ID NO: 16153 - DNA, 26 bp, Homo sapiens
caggtcatcggcatcgcggaggagcc

SEQ ID NO: 16154 - DNA, 26 bp, Homo sapiens
aggtcatcggcatcgcggaggagccg

SEQ ID NO: 16155 - DNA, 26 bp, Homo sapiens
ggtcatcggcatcgcggaggagccgc

SEQ ID NO: 16156 - DNA, 26 bp, Homo sapiens
gtcatcggcatcgcggaggagccgct

SEQ ID NO: 16157 - DNA, 26 bp, Homo sapiens
tcatcggcatcgcggaggagccgctt

SEQ ID NO: 16158 - DNA, 26 bp, Homo sapiens
catcggcatcgcggaggagccgctta

SEQ ID NO: 16159 - DNA, 26 bp, Homo sapiens
atcggcatcgcggaggagccgcttac

SEQ ID NO: 16160 - DNA, 26 bp, Homo sapiens
tcggcatcgcggaggagccgcttacg

SEQ ID NO: 16161 - DNA, 26 bp, Homo sapiens
cggcatcgcggaggagccgcttacgc

SEQ ID NO: 16162 - DNA, 26 bp, Homo sapiens
ggcatcgcggaggagccgcttacgca

SEQ ID NO: 16163 - DNA, 26 bp, Homo sapiens
gcatcgcggaggagccgcttacgcag

SEQ ID NO: 16164 - DNA, 26 bp, Homo sapiens
catcgcggaggagccgcttacgcagc

SEQ ID NO: 16165 - DNA, 26 bp, Homo sapiens
atcgcggaggagccgcttacgcagct

SEQ ID NO: 16166 - DNA, 26 bp, Homo sapiens
tcgcggaggagccgcttacgcagctt

SEQ ID NO: 16167 - DNA, 26 bp, Homo sapiens
cgcggaggagccgcttacgcagcttg

SEQ ID NO: 16168 - DNA, 26 bp, Homo sapiens
gcggaggagccgcttacgcagcttgc

SEQ ID NO: 16169 - DNA, 26 bp, Homo sapiens
cggaggagccgcttacgcagcttgcg

SEQ ID NO: 16170 - DNA, 26 bp, Homo sapiens
ggaggagccgcttacgcagcttgcgc

SEQ ID NO: 16171 - DNA, 26 bp, Homo sapiens
gaggagccgcttacgcagcttgcgca

SEQ ID NO: 16172 - DNA, 26 bp, Homo sapiens
aggagccgcttacgcagcttgcgcag

SEQ ID NO: 16173 - DNA, 26 bp, Homo sapiens
ggagccgcttacgcagcttgcgcagg

SEQ ID NO: 16174 - DNA, 26 bp, Homo sapiens
gagccgcttacgcagcttgcgcaggt

SEQ ID NO: 16175 - DNA, 26 bp, Homo sapiens
agccgcttacgcagcttgcgcaggtg

SEQ ID NO: 16176 - DNA, 26 bp, Homo sapiens
gccgcttacgcagcttgcgcaggtgg

SEQ ID NO: 16177 - DNA, 26 bp, Homo sapiens
ccgcttacgcagcttgcgcaggtggg

SEQ ID NO: 16178 - DNA, 26 bp, Homo sapiens
cgcttacgcagcttgcgcaggtggga

SEQ ID NO: 16179 - DNA, 26 bp, Homo sapiens
gcttacgcagcttgcgcaggtgggag

SEQ ID NO: 16180 - DNA, 26 bp, Homo sapiens
cttacgcagcttgcgcaggtgggagg

SEQ ID NO: 16181 - DNA, 26 bp, Homo sapiens
ttacgcagcttgcgcaggtgggaggc

SEQ ID NO: 16182 - DNA, 26 bp, Homo sapiens
tacgcagcttgcgcaggtgggaggcg

SEQ ID NO: 16183 - DNA, 26 bp, Homo sapiens
acgcagcttgcgcaggtgggaggcga

SEQ ID NO: 16184 - DNA, 26 bp, Homo sapiens
cgcagcttgcgcaggtgggaggcgag

SEQ ID NO: 16185 - DNA, 26 bp, Homo sapiens
gcagcttgcgcaggtgggaggcgagg

SEQ ID NO: 16186 - DNA, 26 bp, Homo sapiens
cagcttgcgcaggtgggaggcgaggc

SEQ ID NO: 16187 - DNA, 26 bp, Homo sapiens
agcttgcgcaggtgggaggcgaggcg

SEQ ID NO: 16188 - DNA, 26 bp, Homo sapiens
gcttgcgcaggtgggaggcgaggcgc

SEQ ID NO: 16189 - DNA, 26 bp, Homo sapiens
cttgcgcaggtgggaggcgaggcgca

SEQ ID NO: 16190 - DNA, 26 bp, Homo sapiens
ttgcgcaggtgggaggcgaggcgcac

SEQ ID NO: 16191 - DNA, 26 bp, Homo sapiens
tgcgcaggtgggaggcgaggcgcacc

SEQ ID NO: 16192 - DNA, 26 bp, Homo sapiens
gcgcaggtgggaggcgaggcgcaccc

SEQ ID NO: 16193 - DNA, 26 bp, Homo sapiens
cgcaggtgggaggcgaggcgcacccg

SEQ ID NO: 16194 - DNA, 26 bp, Homo sapiens
gcaggtgggaggcgaggcgcacccgc

SEQ ID NO: 16195 - DNA, 26 bp, Homo sapiens
caggtgggaggcgaggcgcacccgca

SEQ ID NO: 16196 - DNA, 26 bp, Homo sapiens
aggtgggaggcgaggcgcacccgcag

SEQ ID NO: 16197 - DNA, 26 bp, Homo sapiens
ggtgggaggcgaggcgcacccgcagc

SEQ ID NO: 16198 - DNA, 26 bp, Homo sapiens
gtgggaggcgaggcgcacccgcagct

SEQ ID NO: 16199 - DNA, 26 bp, Homo sapiens
tgggaggcgaggcgcacccgcagctc

SEQ ID NO: 16200 - DNA, 26 bp, Homo sapiens
gggaggcgaggcgcacccgcagctcc

SEQ ID NO: 16201 - DNA, 26 bp, Homo sapiens
ggaggcgaggcgcacccgcagctcct

SEQ ID NO: 16202 - DNA, 26 bp, Homo sapiens
gaggcgaggcgcacccgcagctcctc

SEQ ID NO: 16203 - DNA, 26 bp, Homo sapiens
aggcgaggcgcacccgcagctcctcg

SEQ ID NO: 16204 - DNA, 26 bp, Homo sapiens
ggcgaggcgcacccgcagctcctcgg

SEQ ID NO: 16205 - DNA, 26 bp, Homo sapiens
gcgaggcgcacccgcagctcctcggt

SEQ ID NO: 16206 - DNA, 26 bp, Homo sapiens
cgaggcgcacccgcagctcctcggtg

SEQ ID NO: 16207 - DNA, 26 bp, Homo sapiens
gaggcgcacccgcagctcctcggtgc

SEQ ID NO: 16208 - DNA, 26 bp, Homo sapiens
aggcgcacccgcagctcctcggtgct

SEQ ID NO: 16209 - DNA, 26 bp, Homo sapiens
ggcgcacccgcagctcctcggtgctc

SEQ ID NO: 16210 - DNA, 26 bp, Homo sapiens
gcgcacccgcagctcctcggtgctct

SEQ ID NO: 16211 - DNA, 26 bp, Homo sapiens
cgcacccgcagctcctcggtgctctg

SEQ ID NO: 16212 - DNA, 26 bp, Homo sapiens
gcacccgcagctcctcggtgctctgg

SEQ ID NO: 16213 - DNA, 26 bp, Homo sapiens
cacccgcagctcctcggtgctctggc

SEQ ID NO: 16214 - DNA, 26 bp, Homo sapiens
acccgcagctcctcggtgctctggcc

SEQ ID NO: 16215 - DNA, 26 bp, Homo sapiens
cccgcagctcctcggtgctctggccg

SEQ ID NO: 16216 - DNA, 26 bp, Homo sapiens
ccgcagctcctcggtgctctggccga

SEQ ID NO: 16217 - DNA, 26 bp, Homo sapiens
cgcagctcctcggtgctctggccgag

SEQ ID NO: 16218 - DNA, 26 bp, Homo sapiens
gcagctcctcggtgctctggccgagc

SEQ ID NO: 16219 - DNA, 26 bp, Homo sapiens
cagctcctcggtgctctggccgagca

SEQ ID NO: 16220 - DNA, 26 bp, Homo sapiens
agctcctcggtgctctggccgagcat

SEQ ID NO: 16221 - DNA, 26 bp, Homo sapiens
gctcctcggtgctctggccgagcatg

SEQ ID NO: 16222 - DNA, 26 bp, Homo sapiens
ctcctcggtgctctggccgagcatgg

SEQ ID NO: 16223 - DNA, 26 bp, Homo sapiens
tcctcggtgctctggccgagcatggc

SEQ ID NO: 16224 - DNA, 26 bp, Homo sapiens
cctcggtgctctggccgagcatggcc

SEQ ID NO: 16225 - DNA, 26 bp, Homo sapiens
ctcggtgctctggccgagcatggcct

SEQ ID NO: 16226 - DNA, 26 bp, Homo sapiens
tcggtgctctggccgagcatggcctg

SEQ ID NO: 16227 - DNA, 26 bp, Homo sapiens
cggtgctctggccgagcatggcctgc

SEQ ID NO: 16228 - DNA, 26 bp, Homo sapiens
ggtgctctggccgagcatggcctgca

SEQ ID NO: 16229 - DNA, 26 bp, Homo sapiens
gtgctctggccgagcatggcctgcac

SEQ ID NO: 16230 - DNA, 26 bp, Homo sapiens
tgctctggccgagcatggcctgcacc

SEQ ID NO: 16231 - DNA, 26 bp, Homo sapiens
gctctggccgagcatggcctgcacct

SEQ ID NO: 16232 - DNA, 26 bp, Homo sapiens
ctctggccgagcatggcctgcacctc

SEQ ID NO: 16233 - DNA, 26 bp, Homo sapiens
tctggccgagcatggcctgcacctcg

SEQ ID NO: 16234 - DNA, 26 bp, Homo sapiens
ctggccgagcatggcctgcacctcgc

SEQ ID NO: 16235 - DNA, 26 bp, Homo sapiens
tggccgagcatggcctgcacctcgcc

SEQ ID NO: 16236 - DNA, 26 bp, Homo sapiens
ggccgagcatggcctgcacctcgccg

SEQ ID NO: 16237 - DNA, 26 bp, Homo sapiens
gccgagcatggcctgcacctcgccgc

SEQ ID NO: 16238 - DNA, 26 bp, Homo sapiens
ccgagcatggcctgcacctcgccgcg

SEQ ID NO: 16239 - DNA, 26 bp, Homo sapiens
cgagcatggcctgcacctcgccgcgg

SEQ ID NO: 16240 - DNA, 26 bp, Homo sapiens
gagcatggcctgcacctcgccgcggt

SEQ ID NO: 16241 - DNA, 26 bp, Homo sapiens
agcatggcctgcacctcgccgcggta

SEQ ID NO: 16242 - DNA, 26 bp, Homo sapiens
gcatggcctgcacctcgccgcggtac

SEQ ID NO: 16243 - DNA, 26 bp, Homo sapiens
catggcctgcacctcgccgcggtact

SEQ ID NO: 16244 - DNA, 26 bp, Homo sapiens
atggcctgcacctcgccgcggtactg

SEQ ID NO: 16245 - DNA, 26 bp, Homo sapiens
tggcctgcacctcgccgcggtactgc

SEQ ID NO: 16246 - DNA, 26 bp, Homo sapiens
ggcctgcacctcgccgcggtactgca

SEQ ID NO: 16247 - DNA, 26 bp, Homo sapiens
gcctgcacctcgccgcggtactgcac

SEQ ID NO: 16248 - DNA, 26 bp, Homo sapiens
cctgcacctcgccgcggtactgcacc

SEQ ID NO: 16249 - DNA, 26 bp, Homo sapiens
ctgcacctcgccgcggtactgcacca

SEQ ID NO: 16250 - DNA, 26 bp, Homo sapiens
tgcacctcgccgcggtactgcaccag

SEQ ID NO: 16251 - DNA, 26 bp, Homo sapiens
gcacctcgccgcggtactgcaccagg

SEQ ID NO: 16252 - DNA, 26 bp, Homo sapiens
cacctcgccgcggtactgcaccaggc

SEQ ID NO: 16253 - DNA, 26 bp, Homo sapiens
acctcgccgcggtactgcaccaggcg

SEQ ID NO: 16254 - DNA, 26 bp, Homo sapiens
cctcgccgcggtactgcaccaggcgg

SEQ ID NO: 16255 - DNA, 26 bp, Homo sapiens
ctcgccgcggtactgcaccaggcggc

SEQ ID NO: 16256 - DNA, 26 bp, Homo sapiens
tcgccgcggtactgcaccaggcggcc

SEQ ID NO: 16257 - DNA, 26 bp, Homo sapiens
cgccgcggtactgcaccaggcggccg

SEQ ID NO: 16258 - DNA, 26 bp, Homo sapiens
gccgcggtactgcaccaggcggccgc

SEQ ID NO: 16259 - DNA, 26 bp, Homo sapiens
ccgcggtactgcaccaggcggccgca

SEQ ID NO: 16260 - DNA, 26 bp, Homo sapiens
cgcggtactgcaccaggcggccgcac

SEQ ID NO: 16261 - DNA, 26 bp, Homo sapiens
gcggtactgcaccaggcggccgcaca

SEQ ID NO: 16262 - DNA, 26 bp, Homo sapiens
cggtactgcaccaggcggccgcacac

SEQ ID NO: 16263 - DNA, 26 bp, Homo sapiens
ggtactgcaccaggcggccgcacacg

SEQ ID NO: 16264 - DNA, 26 bp, Homo sapiens
gtactgcaccaggcggccgcacacgt

SEQ ID NO: 16265 - DNA, 26 bp, Homo sapiens
tactgcaccaggcggccgcacacgtc

SEQ ID NO: 16266 - DNA, 26 bp, Homo sapiens
actgcaccaggcggccgcacacgtcc

SEQ ID NO: 16267 - DNA, 26 bp, Homo sapiens
ctgcaccaggcggccgcacacgtcct

SEQ ID NO: 16268 - DNA, 26 bp, Homo sapiens
tgcaccaggcggccgcacacgtcctc

SEQ ID NO: 16269 - DNA, 26 bp, Homo sapiens
gcaccaggcggccgcacacgtcctcc

SEQ ID NO: 16270 - DNA, 26 bp, Homo sapiens
caccaggcggccgcacacgtcctcca

SEQ ID NO: 16271 - DNA, 26 bp, Homo sapiens
accaggcggccgcacacgtcctccat

SEQ ID NO: 16272 - DNA, 26 bp, Homo sapiens
ccaggcggccgcacacgtcctccatg

SEQ ID NO: 16273 - DNA, 26 bp, Homo sapiens
caggcggccgcacacgtcctccatgt

SEQ ID NO: 16274 - DNA, 26 bp, Homo sapiens
aggcggccgcacacgtcctccatgtc

SEQ ID NO: 16275 - DNA, 26 bp, Homo sapiens
ggcggccgcacacgtcctccatgtcc

SEQ ID NO: 16276 - DNA, 26 bp, Homo sapiens
gcggccgcacacgtcctccatgtccg

SEQ ID NO: 16277 - DNA, 26 bp, Homo sapiens
cggccgcacacgtcctccatgtccgc

SEQ ID NO: 16278 - DNA, 26 bp, Homo sapiens
ggccgcacacgtcctccatgtccgcg

SEQ ID NO: 16279 - DNA, 26 bp, Homo sapiens
gccgcacacgtcctccatgtccgcgc

SEQ ID NO: 16280 - DNA, 26 bp, Homo sapiens
ccgcacacgtcctccatgtccgcgcc

SEQ ID NO: 16281 - DNA, 26 bp, Homo sapiens
cgcacacgtcctccatgtccgcgccc

SEQ ID NO: 16282 - DNA, 26 bp, Homo sapiens
gcacacgtcctccatgtccgcgccca

SEQ ID NO: 16283 - DNA, 26 bp, Homo sapiens
cacacgtcctccatgtccgcgcccag

SEQ ID NO: 16284 - DNA, 26 bp, Homo sapiens
acacgtcctccatgtccgcgcccagc

SEQ ID NO: 16285 - DNA, 26 bp, Homo sapiens
cacgtcctccatgtccgcgcccagcc

SEQ ID NO: 16286 - DNA, 26 bp, Homo sapiens
acgtcctccatgtccgcgcccagccg

SEQ ID NO: 16287 - DNA, 26 bp, Homo sapiens
cgtcctccatgtccgcgcccagccgg

SEQ ID NO: 16288 - DNA, 26 bp, Homo sapiens
gtcctccatgtccgcgcccagccggg

SEQ ID NO: 16289 - DNA, 26 bp, Homo sapiens
tcctccatgtccgcgcccagccgggc

SEQ ID NO: 16290 - DNA, 26 bp, Homo sapiens
cctccatgtccgcgcccagccgggcc

SEQ ID NO: 16291 - DNA, 26 bp, Homo sapiens
ctccatgtccgcgcccagccgggcct

SEQ ID NO: 16292 - DNA, 26 bp, Homo sapiens
tccatgtccgcgcccagccgggcctg

SEQ ID NO: 16293 - DNA, 26 bp, Homo sapiens
ccatgtccgcgcccagccgggcctgc

SEQ ID NO: 16294 - DNA, 26 bp, Homo sapiens
catgtccgcgcccagccgggcctgcg

SEQ ID NO: 16295 - DNA, 26 bp, Homo sapiens
atgtccgcgcccagccgggcctgcgc

SEQ ID NO: 16296 - DNA, 26 bp, Homo sapiens
tgtccgcgcccagccgggcctgcgcc

SEQ ID NO: 16297 - DNA, 26 bp, Homo sapiens
gtccgcgcccagccgggcctgcgccg

SEQ ID NO: 16298 - DNA, 26 bp, Homo sapiens
tccgcgcccagccgggcctgcgccgc

SEQ ID NO: 16299 - DNA, 26 bp, Homo sapiens
ccgcgcccagccgggcctgcgccgcc

SEQ ID NO: 16300 - DNA, 26 bp, Homo sapiens
cgcgcccagccgggcctgcgccgcct

SEQ ID NO: 16301 - DNA, 26 bp, Homo sapiens
gcgcccagccgggcctgcgccgcctg

SEQ ID NO: 16302 - DNA, 26 bp, Homo sapiens
cgcccagccgggcctgcgccgcctgc

SEQ ID NO: 16303 - DNA, 26 bp, Homo sapiens
gcccagccgggcctgcgccgcctgca

SEQ ID NO: 16304 - DNA, 26 bp, Homo sapiens
cccagccgggcctgcgccgcctgcag

SEQ ID NO: 16305 - DNA, 26 bp, Homo sapiens
ccagccgggcctgcgccgcctgcagc

SEQ ID NO: 16306 - DNA, 26 bp, Homo sapiens
cagccgggcctgcgccgcctgcagct

SEQ ID NO: 16307 - DNA, 26 bp, Homo sapiens
agccgggcctgcgccgcctgcagctc

SEQ ID NO: 16308 - DNA, 26 bp, Homo sapiens
gccgggcctgcgccgcctgcagctcc

SEQ ID NO: 16309 - DNA, 26 bp, Homo sapiens
ccgggcctgcgccgcctgcagctcct

SEQ ID NO: 16310 - DNA, 26 bp, Homo sapiens
cgggcctgcgccgcctgcagctcctt

SEQ ID NO: 16311 - DNA, 26 bp, Homo sapiens
gggcctgcgccgcctgcagctccttg

SEQ ID NO: 16312 - DNA, 26 bp, Homo sapiens
ggcctgcgccgcctgcagctccttgg

SEQ ID NO: 16313 - DNA, 26 bp, Homo sapiens
gcctgcgccgcctgcagctccttgga

SEQ ID NO: 16314 - DNA, 26 bp, Homo sapiens
cctgcgccgcctgcagctccttggac

SEQ ID NO: 16315 - DNA, 26 bp, Homo sapiens
ctgcgccgcctgcagctccttggaca

SEQ ID NO: 16316 - DNA, 26 bp, Homo sapiens
tgcgccgcctgcagctccttggacag

SEQ ID NO: 16317 - DNA, 26 bp, Homo sapiens
gcgccgcctgcagctccttggacagc

SEQ ID NO: 16318 - DNA, 26 bp, Homo sapiens
cgccgcctgcagctccttggacagcc

SEQ ID NO: 16319 - DNA, 26 bp, Homo sapiens
gccgcctgcagctccttggacagccg

SEQ ID NO: 16320 - DNA, 26 bp, Homo sapiens
ccgcctgcagctccttggacagccgt

SEQ ID NO: 16321 - DNA, 26 bp, Homo sapiens
cgcctgcagctccttggacagccgtg

SEQ ID NO: 16322 - DNA, 26 bp, Homo sapiens
gcctgcagctccttggacagccgtgc

SEQ ID NO: 16323 - DNA, 26 bp, Homo sapiens
cctgcagctccttggacagccgtgcc

SEQ ID NO: 16324 - DNA, 26 bp, Homo sapiens
ctgcagctccttggacagccgtgccc

SEQ ID NO: 16325 - DNA, 26 bp, Homo sapiens
tgcagctccttggacagccgtgcccg

SEQ ID NO: 16326 - DNA, 26 bp, Homo sapiens
gcagctccttggacagccgtgcccgc

SEQ ID NO: 16327 - DNA, 26 bp, Homo sapiens
cagctccttggacagccgtgcccgcg

SEQ ID NO: 16328 - DNA, 26 bp, Homo sapiens
agctccttggacagccgtgcccgcgt

SEQ ID NO: 16329 - DNA, 26 bp, Homo sapiens
gctccttggacagccgtgcccgcgtc

SEQ ID NO: 16330 - DNA, 26 bp, Homo sapiens
ctccttggacagccgtgcccgcgtct

SEQ ID NO: 16331 - DNA, 26 bp, Homo sapiens
tccttggacagccgtgcccgcgtctc

SEQ ID NO: 16332 - DNA, 26 bp, Homo sapiens
ccttggacagccgtgcccgcgtctcc

SEQ ID NO: 16333 - DNA, 26 bp, Homo sapiens
cttggacagccgtgcccgcgtctcct

SEQ ID NO: 16334 - DNA, 26 bp, Homo sapiens
ttggacagccgtgcccgcgtctcctc

SEQ ID NO: 16335 - DNA, 26 bp, Homo sapiens
tggacagccgtgcccgcgtctcctcc

SEQ ID NO: 16336 - DNA, 26 bp, Homo sapiens
ggacagccgtgcccgcgtctcctccg

SEQ ID NO: 16337 - DNA, 26 bp, Homo sapiens
gacagccgtgcccgcgtctcctccgc

SEQ ID NO: 16338 - DNA, 26 bp, Homo sapiens
acagccgtgcccgcgtctcctccgcc

SEQ ID NO: 16339 - DNA, 26 bp, Homo sapiens
cagccgtgcccgcgtctcctccgcca

SEQ ID NO: 16340 - DNA, 26 bp, Homo sapiens
agccgtgcccgcgtctcctccgccac

SEQ ID NO: 16341 - DNA, 26 bp, Homo sapiens
gccgtgcccgcgtctcctccgccacc

SEQ ID NO: 16342 - DNA, 26 bp, Homo sapiens
ccgtgcccgcgtctcctccgccaccg

SEQ ID NO: 16343 - DNA, 26 bp, Homo sapiens
cgtgcccgcgtctcctccgccaccgg

SEQ ID NO: 16344 - DNA, 26 bp, Homo sapiens
gtgcccgcgtctcctccgccaccggg

SEQ ID NO: 16345 - DNA, 26 bp, Homo sapiens
tgcccgcgtctcctccgccaccgggg

SEQ ID NO: 16346 - DNA, 26 bp, Homo sapiens
gcccgcgtctcctccgccaccggggt

SEQ ID NO: 16347 - DNA, 26 bp, Homo sapiens
cccgcgtctcctccgccaccggggtc

SEQ ID NO: 16348 - DNA, 26 bp, Homo sapiens
ccgcgtctcctccgccaccggggtca

SEQ ID NO: 16349 - DNA, 26 bp, Homo sapiens
cgcgtctcctccgccaccggggtcag

SEQ ID NO: 16350 - DNA, 26 bp, Homo sapiens
gcgtctcctccgccaccggggtcagt

SEQ ID NO: 16351 - DNA, 26 bp, Homo sapiens
cgtctcctccgccaccggggtcagtt

SEQ ID NO: 16352 - DNA, 26 bp, Homo sapiens
gtctcctccgccaccggggtcagttg

SEQ ID NO: 16353 - DNA, 26 bp, Homo sapiens
tctcctccgccaccggggtcagttgt

SEQ ID NO: 16354 - DNA, 26 bp, Homo sapiens
ctcctccgccaccggggtcagttgtt

SEQ ID NO: 16355 - DNA, 26 bp, Homo sapiens
tcctccgccaccggggtcagttgttc

SEQ ID NO: 16356 - DNA, 26 bp, Homo sapiens
cctccgccaccggggtcagttgttcc

SEQ ID NO: 16357 - DNA, 26 bp, Homo sapiens
ctccgccaccggggtcagttgttcct

SEQ ID NO: 16358 - DNA, 26 bp, Homo sapiens
tccgccaccggggtcagttgttcctc

SEQ ID NO: 16359 - DNA, 26 bp, Homo sapiens
ccgccaccggggtcagttgttcctcc

SEQ ID NO: 16360 - DNA, 26 bp, Homo sapiens
cgccaccggggtcagttgttcctcca

SEQ ID NO: 16361 - DNA, 26 bp, Homo sapiens
gccaccggggtcagttgttcctccag

SEQ ID NO: 16362 - DNA, 26 bp, Homo sapiens
ccaccggggtcagttgttcctccagt

SEQ ID NO: 16363 - DNA, 26 bp, Homo sapiens
caccggggtcagttgttcctccagtt

SEQ ID NO: 16364 - DNA, 26 bp, Homo sapiens
accggggtcagttgttcctccagttc

SEQ ID NO: 16365 - DNA, 26 bp, Homo sapiens
ccggggtcagttgttcctccagttcc

SEQ ID NO: 16366 - DNA, 26 bp, Homo sapiens
cggggtcagttgttcctccagttccg

SEQ ID NO: 16367 - DNA, 26 bp, Homo sapiens
ggggtcagttgttcctccagttccga

SEQ ID NO: 16368 - DNA, 26 bp, Homo sapiens
gggtcagttgttcctccagttccgat

SEQ ID NO: 16369 - DNA, 26 bp, Homo sapiens
ggtcagttgttcctccagttccgatt

SEQ ID NO: 16370 - DNA, 26 bp, Homo sapiens
gtcagttgttcctccagttccgattt

SEQ ID NO: 16371 - DNA, 26 bp, Homo sapiens
tcagttgttcctccagttccgatttg

SEQ ID NO: 16372 - DNA, 26 bp, Homo sapiens
cagttgttcctccagttccgatttgt

SEQ ID NO: 16373 - DNA, 26 bp, Homo sapiens
agttgttcctccagttccgatttgta

SEQ ID NO: 16374 - DNA, 26 bp, Homo sapiens
gttgttcctccagttccgatttgtag

SEQ ID NO: 16375 - DNA, 26 bp, Homo sapiens
ttgttcctccagttccgatttgtagg

SEQ ID NO: 16376 - DNA, 26 bp, Homo sapiens
tgttcctccagttccgatttgtaggc

SEQ ID NO: 16377 - DNA, 26 bp, Homo sapiens
gttcctccagttccgatttgtaggcc

SEQ ID NO: 16378 - DNA, 26 bp, Homo sapiens
ttcctccagttccgatttgtaggcct

SEQ ID NO: 16379 - DNA, 26 bp, Homo sapiens
tcctccagttccgatttgtaggcctt

SEQ ID NO: 16380 - DNA, 26 bp, Homo sapiens
cctccagttccgatttgtaggccttc

SEQ ID NO: 16381 - DNA, 26 bp, Homo sapiens
ctccagttccgatttgtaggccttca

SEQ ID NO: 16382 - DNA, 26 bp, Homo sapiens
tccagttccgatttgtaggccttcaa

SEQ ID NO: 16383 - DNA, 26 bp, Homo sapiens
ccagttccgatttgtaggccttcaac

SEQ ID NO: 16384 - DNA, 26 bp, Homo sapiens
cagttccgatttgtaggccttcaact

SEQ ID NO: 16385 - DNA, 26 bp, Homo sapiens
agttccgatttgtaggccttcaactc

SEQ ID NO: 16386 - DNA, 26 bp, Homo sapiens
gttccgatttgtaggccttcaactcc

SEQ ID NO: 16387 - DNA, 26 bp, Homo sapiens
ttccgatttgtaggccttcaactcct

SEQ ID NO: 16388 - DNA, 26 bp, Homo sapiens
tccgatttgtaggccttcaactcctt

SEQ ID NO: 16389 - DNA, 26 bp, Homo sapiens
ccgatttgtaggccttcaactccttc

SEQ ID NO: 16390 - DNA, 26 bp, Homo sapiens
cgatttgtaggccttcaactccttca

SEQ ID NO: 16391 - DNA, 26 bp, Homo sapiens
gatttgtaggccttcaactccttcat

SEQ ID NO: 16392 - DNA, 26 bp, Homo sapiens
atttgtaggccttcaactccttcatg

SEQ ID NO: 16393 - DNA, 26 bp, Homo sapiens
tttgtaggccttcaactccttcatgg

SEQ ID NO: 16394 - DNA, 26 bp, Homo sapiens
ttgtaggccttcaactccttcatggt

SEQ ID NO: 16395 - DNA, 26 bp, Homo sapiens
tgtaggccttcaactccttcatggtc

SEQ ID NO: 16396 - DNA, 26 bp, Homo sapiens
gtaggccttcaactccttcatggtct

SEQ ID NO: 16397 - DNA, 26 bp, Homo sapiens
taggccttcaactccttcatggtctc

SEQ ID NO: 16398 - DNA, 26 bp, Homo sapiens
aggccttcaactccttcatggtctcg

SEQ ID NO: 16399 - DNA, 26 bp, Homo sapiens
ggccttcaactccttcatggtctcgt

SEQ ID NO: 16400 - DNA, 26 bp, Homo sapiens
gccttcaactccttcatggtctcgtc

SEQ ID NO: 16401 - DNA, 26 bp, Homo sapiens
ccttcaactccttcatggtctcgtcc

SEQ ID NO: 16402 - DNA, 26 bp, Homo sapiens
cttcaactccttcatggtctcgtcca

SEQ ID NO: 16403 - DNA, 26 bp, Homo sapiens
ttcaactccttcatggtctcgtccat

SEQ ID NO: 16404 - DNA, 26 bp, Homo sapiens
tcaactccttcatggtctcgtccatc

SEQ ID NO: 16405 - DNA, 26 bp, Homo sapiens
caactccttcatggtctcgtccatca

SEQ ID NO: 16406 - DNA, 26 bp, Homo sapiens
aactccttcatggtctcgtccatcag

SEQ ID NO: 16407 - DNA, 26 bp, Homo sapiens
actccttcatggtctcgtccatcagc

SEQ ID NO: 16408 - DNA, 26 bp, Homo sapiens
ctccttcatggtctcgtccatcagcg

SEQ ID NO: 16409 - DNA, 26 bp, Homo sapiens
tccttcatggtctcgtccatcagcgc

SEQ ID NO: 16410 - DNA, 26 bp, Homo sapiens
ccttcatggtctcgtccatcagcgcc

SEQ ID NO: 16411 - DNA, 26 bp, Homo sapiens
cttcatggtctcgtccatcagcgccc

SEQ ID NO: 16412 - DNA, 26 bp, Homo sapiens
ttcatggtctcgtccatcagcgccct

SEQ ID NO: 16413 - DNA, 26 bp, Homo sapiens
tcatggtctcgtccatcagcgccctc

SEQ ID NO: 16414 - DNA, 26 bp, Homo sapiens
catggtctcgtccatcagcgccctca

SEQ ID NO: 16415 - DNA, 26 bp, Homo sapiens
atggtctcgtccatcagcgccctcag

SEQ ID NO: 16416 - DNA, 26 bp, Homo sapiens
tggtctcgtccatcagcgccctcagt

SEQ ID NO: 16417 - DNA, 26 bp, Homo sapiens
ggtctcgtccatcagcgccctcagtt

SEQ ID NO: 16418 - DNA, 26 bp, Homo sapiens
gtctcgtccatcagcgccctcagttc

SEQ ID NO: 16419 - DNA, 26 bp, Homo sapiens
tctcgtccatcagcgccctcagttcc

SEQ ID NO: 16420 - DNA, 26 bp, Homo sapiens
ctcgtccatcagcgccctcagttcct

SEQ ID NO: 16421 - DNA, 26 bp, Homo sapiens
tcgtccatcagcgccctcagttcctg

SEQ ID NO: 16422 - DNA, 26 bp, Homo sapiens
cgtccatcagcgccctcagttcctgg

SEQ ID NO: 16423 - DNA, 26 bp, Homo sapiens
gtccatcagcgccctcagttcctggg

SEQ ID NO: 16424 - DNA, 26 bp, Homo sapiens
tccatcagcgccctcagttcctgggt

SEQ ID NO: 16425 - DNA, 26 bp, Homo sapiens
ccatcagcgccctcagttcctgggtg

SEQ ID NO: 16426 - DNA, 26 bp, Homo sapiens
catcagcgccctcagttcctgggtga

SEQ ID NO: 16427 - DNA, 26 bp, Homo sapiens
atcagcgccctcagttcctgggtgac

SEQ ID NO: 16428 - DNA, 26 bp, Homo sapiens
tcagcgccctcagttcctgggtgacc

SEQ ID NO: 16429 - DNA, 26 bp, Homo sapiens
cagcgccctcagttcctgggtgacct

SEQ ID NO: 16430 - DNA, 26 bp, Homo sapiens
agcgccctcagttcctgggtgacctg

SEQ ID NO: 16431 - DNA, 26 bp, Homo sapiens
gcgccctcagttcctgggtgacctgg

SEQ ID NO: 16432 - DNA, 26 bp, Homo sapiens
cgccctcagttcctgggtgacctggg

SEQ ID NO: 16433 - DNA, 26 bp, Homo sapiens
gccctcagttcctgggtgacctggga

SEQ ID NO: 16434 - DNA, 26 bp, Homo sapiens
ccctcagttcctgggtgacctgggag

SEQ ID NO: 16435 - DNA, 26 bp, Homo sapiens
cctcagttcctgggtgacctgggagc

SEQ ID NO: 16436 - DNA, 26 bp, Homo sapiens
ctcagttcctgggtgacctgggagct

SEQ ID NO: 16437 - DNA, 26 bp, Homo sapiens
tcagttcctgggtgacctgggagctg

SEQ ID NO: 16438 - DNA, 26 bp, Homo sapiens
cagttcctgggtgacctgggagctga

SEQ ID NO: 16439 - DNA, 26 bp, Homo sapiens
agttcctgggtgacctgggagctgag

SEQ ID NO: 16440 - DNA, 26 bp, Homo sapiens
gttcctgggtgacctgggagctgagc

SEQ ID NO: 16441 - DNA, 26 bp, Homo sapiens
ttcctgggtgacctgggagctgagca

SEQ ID NO: 16442 - DNA, 26 bp, Homo sapiens
tcctgggtgacctgggagctgagcag

SEQ ID NO: 16443 - DNA, 26 bp, Homo sapiens
cctgggtgacctgggagctgagcagc

SEQ ID NO: 16444 - DNA, 26 bp, Homo sapiens
ctgggtgacctgggagctgagcagct

SEQ ID NO: 16445 - DNA, 26 bp, Homo sapiens
tgggtgacctgggagctgagcagctc

SEQ ID NO: 16446 - DNA, 26 bp, Homo sapiens
gggtgacctgggagctgagcagctcc

SEQ ID NO: 16447 - DNA, 26 bp, Homo sapiens
ggtgacctgggagctgagcagctcct

SEQ ID NO: 16448 - DNA, 26 bp, Homo sapiens
gtgacctgggagctgagcagctcctc

SEQ ID NO: 16449 - DNA, 26 bp, Homo sapiens
tgacctgggagctgagcagctcctcc

SEQ ID NO: 16450 - DNA, 26 bp, Homo sapiens
gacctgggagctgagcagctcctcct

SEQ ID NO: 16451 - DNA, 26 bp, Homo sapiens
acctgggagctgagcagctcctcctg

SEQ ID NO: 16452 - DNA, 26 bp, Homo sapiens
cctgggagctgagcagctcctcctgc

SEQ ID NO: 16453 - DNA, 26 bp, Homo sapiens
ctgggagctgagcagctcctcctgca

SEQ ID NO: 16454 - DNA, 26 bp, Homo sapiens
tgggagctgagcagctcctcctgcac

SEQ ID NO: 16455 - DNA, 26 bp, Homo sapiens
gggagctgagcagctcctcctgcacc

SEQ ID NO: 16456 - DNA, 26 bp, Homo sapiens
ggagctgagcagctcctcctgcacct

SEQ ID NO: 16457 - DNA, 26 bp, Homo sapiens
gagctgagcagctcctcctgcacctg

SEQ ID NO: 16458 - DNA, 26 bp, Homo sapiens
agctgagcagctcctcctgcacctgc

SEQ ID NO: 16459 - DNA, 26 bp, Homo sapiens
gctgagcagctcctcctgcacctgct

SEQ ID NO: 16460 - DNA, 26 bp, Homo sapiens
ctgagcagctcctcctgcacctgctc

SEQ ID NO: 16461 - DNA, 26 bp, Homo sapiens
tgagcagctcctcctgcacctgctca

SEQ ID NO: 16462 - DNA, 26 bp, Homo sapiens
gagcagctcctcctgcacctgctcag

SEQ ID NO: 16463 - DNA, 26 bp, Homo sapiens
agcagctcctcctgcacctgctcaga

SEQ ID NO: 16464 - DNA, 26 bp, Homo sapiens
gcagctcctcctgcacctgctcagac

SEQ ID NO: 16465 - DNA, 26 bp, Homo sapiens
cagctcctcctgcacctgctcagaca

SEQ ID NO: 16466 - DNA, 26 bp, Homo sapiens
agctcctcctgcacctgctcagacag

SEQ ID NO: 16467 - DNA, 26 bp, Homo sapiens
gctcctcctgcacctgctcagacagt

SEQ ID NO: 16468 - DNA, 26 bp, Homo sapiens
ctcctcctgcacctgctcagacagtg

SEQ ID NO: 16469 - DNA, 26 bp, Homo sapiens
tcctcctgcacctgctcagacagtgt

SEQ ID NO: 16470 - DNA, 26 bp, Homo sapiens
cctcctgcacctgctcagacagtgtc

SEQ ID NO: 16471 - DNA, 26 bp, Homo sapiens
ctcctgcacctgctcagacagtgtct

SEQ ID NO: 16472 - DNA, 26 bp, Homo sapiens
tcctgcacctgctcagacagtgtctg

SEQ ID NO: 16473 - DNA, 26 bp, Homo sapiens
cctgcacctgctcagacagtgtctgc

SEQ ID NO: 16474 - DNA, 26 bp, Homo sapiens
ctgcacctgctcagacagtgtctgca

SEQ ID NO: 16475 - DNA, 26 bp, Homo sapiens
tgcacctgctcagacagtgtctgcac

SEQ ID NO: 16476 - DNA, 26 bp, Homo sapiens
gcacctgctcagacagtgtctgcacc

SEQ ID NO: 16477 - DNA, 26 bp, Homo sapiens
cacctgctcagacagtgtctgcaccc

SEQ ID NO: 16478 - DNA, 26 bp, Homo sapiens
acctgctcagacagtgtctgcaccca

SEQ ID NO: 16479 - DNA, 26 bp, Homo sapiens
cctgctcagacagtgtctgcacccag

SEQ ID NO: 16480 - DNA, 26 bp, Homo sapiens
ctgctcagacagtgtctgcacccagc

SEQ ID NO: 16481 - DNA, 26 bp, Homo sapiens
tgctcagacagtgtctgcacccagcg

SEQ ID NO: 16482 - DNA, 26 bp, Homo sapiens
gctcagacagtgtctgcacccagcgc

SEQ ID NO: 16483 - DNA, 26 bp, Homo sapiens
ctcagacagtgtctgcacccagcgca

SEQ ID NO: 16484 - DNA, 26 bp, Homo sapiens
tcagacagtgtctgcacccagcgcag

SEQ ID NO: 16485 - DNA, 26 bp, Homo sapiens
cagacagtgtctgcacccagcgcagg

SEQ ID NO: 16486 - DNA, 26 bp, Homo sapiens
agacagtgtctgcacccagcgcaggt

SEQ ID NO: 16487 - DNA, 26 bp, Homo sapiens
gacagtgtctgcacccagcgcaggta

SEQ ID NO: 16488 - DNA, 26 bp, Homo sapiens
acagtgtctgcacccagcgcaggtaa

SEQ ID NO: 16489 - DNA, 26 bp, Homo sapiens
cagtgtctgcacccagcgcaggtaat

SEQ ID NO: 16490 - DNA, 26 bp, Homo sapiens
agtgtctgcacccagcgcaggtaatc

SEQ ID NO: 16491 - DNA, 26 bp, Homo sapiens
gtgtctgcacccagcgcaggtaatcc

SEQ ID NO: 16492 - DNA, 26 bp, Homo sapiens
tgtctgcacccagcgcaggtaatccc

SEQ ID NO: 16493 - DNA, 26 bp, Homo sapiens
gtctgcacccagcgcaggtaatccca

SEQ ID NO: 16494 - DNA, 26 bp, Homo sapiens
tctgcacccagcgcaggtaatcccaa

SEQ ID NO: 16495 - DNA, 26 bp, Homo sapiens
ctgcacccagcgcaggtaatcccaaa

SEQ ID NO: 16496 - DNA, 26 bp, Homo sapiens
tgcacccagcgcaggtaatcccaaaa

SEQ ID NO: 16497 - DNA, 26 bp, Homo sapiens
gcacccagcgcaggtaatcccaaaag

SEQ ID NO: 16498 - DNA, 26 bp, Homo sapiens
cacccagcgcaggtaatcccaaaagc

SEQ ID NO: 16499 - DNA, 26 bp, Homo sapiens
acccagcgcaggtaatcccaaaagcg

SEQ ID NO: 16500 - DNA, 26 bp, Homo sapiens
cccagcgcaggtaatcccaaaagcga

SEQ ID NO: 16501 - DNA, 26 bp, Homo sapiens
ccagcgcaggtaatcccaaaagcgac

SEQ ID NO: 16502 - DNA, 26 bp, Homo sapiens
cagcgcaggtaatcccaaaagcgacc

SEQ ID NO: 16503 - DNA, 26 bp, Homo sapiens
agcgcaggtaatcccaaaagcgaccc

SEQ ID NO: 16504 - DNA, 26 bp, Homo sapiens
gcgcaggtaatcccaaaagcgaccca

SEQ ID NO: 16505 - DNA, 26 bp, Homo sapiens
cgcaggtaatcccaaaagcgacccag

SEQ ID NO: 16506 - DNA, 26 bp, Homo sapiens
gcaggtaatcccaaaagcgacccagt

SEQ ID NO: 16507 - DNA, 26 bp, Homo sapiens
caggtaatcccaaaagcgacccagtg

SEQ ID NO: 16508 - DNA, 26 bp, Homo sapiens
aggtaatcccaaaagcgacccagtgc

SEQ ID NO: 16509 - DNA, 26 bp, Homo sapiens
ggtaatcccaaaagcgacccagtgcc

SEQ ID NO: 16510 - DNA, 26 bp, Homo sapiens
gtaatcccaaaagcgacccagtgcca

SEQ ID NO: 16511 - DNA, 26 bp, Homo sapiens
taatcccaaaagcgacccagtgccag

SEQ ID NO: 16512 - DNA, 26 bp, Homo sapiens
aatcccaaaagcgacccagtgccagt

SEQ ID NO: 16513 - DNA, 26 bp, Homo sapiens
atcccaaaagcgacccagtgccagtt

SEQ ID NO: 16514 - DNA, 26 bp, Homo sapiens
tcccaaaagcgacccagtgccagttc

SEQ ID NO: 16515 - DNA, 26 bp, Homo sapiens
cccaaaagcgacccagtgccagttcc

SEQ ID NO: 16516 - DNA, 26 bp, Homo sapiens
ccaaaagcgacccagtgccagttccc

SEQ ID NO: 16517 - DNA, 26 bp, Homo sapiens
caaaagcgacccagtgccagttccca

SEQ ID NO: 16518 - DNA, 26 bp, Homo sapiens
aaaagcgacccagtgccagttcccag

SEQ ID NO: 16519 - DNA, 26 bp, Homo sapiens
aaagcgacccagtgccagttcccagc

SEQ ID NO: 16520 - DNA, 26 bp, Homo sapiens
aagcgacccagtgccagttcccagcg

SEQ ID NO: 16521 - DNA, 26 bp, Homo sapiens
agcgacccagtgccagttcccagcgc

SEQ ID NO: 16522 - DNA, 26 bp, Homo sapiens
gcgacccagtgccagttcccagcgct

SEQ ID NO: 16523 - DNA, 26 bp, Homo sapiens
cgacccagtgccagttcccagcgctg

SEQ ID NO: 16524 - DNA, 26 bp, Homo sapiens
gacccagtgccagttcccagcgctgg

SEQ ID NO: 16525 - DNA, 26 bp, Homo sapiens
acccagtgccagttcccagcgctggc

SEQ ID NO: 16526 - DNA, 26 bp, Homo sapiens
cccagtgccagttcccagcgctggcc

SEQ ID NO: 16527 - DNA, 26 bp, Homo sapiens
ccagtgccagttcccagcgctggccg

SEQ ID NO: 16528 - DNA, 26 bp, Homo sapiens
cagtgccagttcccagcgctggccgc

SEQ ID NO: 16529 - DNA, 26 bp, Homo sapiens
agtgccagttcccagcgctggccgct

SEQ ID NO: 16530 - DNA, 26 bp, Homo sapiens
gtgccagttcccagcgctggccgctc

SEQ ID NO: 16531 - DNA, 26 bp, Homo sapiens
tgccagttcccagcgctggccgctct

SEQ ID NO: 16532 - DNA, 26 bp, Homo sapiens
gccagttcccagcgctggccgctctg

SEQ ID NO: 16533 - DNA, 26 bp, Homo sapiens
ccagttcccagcgctggccgctctgc

SEQ ID NO: 16534 - DNA, 26 bp, Homo sapiens
cagttcccagcgctggccgctctgcc

SEQ ID NO: 16535 - DNA, 26 bp, Homo sapiens
agttcccagcgctggccgctctgcca

SEQ ID NO: 16536 - DNA, 26 bp, Homo sapiens
gttcccagcgctggccgctctgccac

SEQ ID NO: 16537 - DNA, 26 bp, Homo sapiens
ttcccagcgctggccgctctgccact

SEQ ID NO: 16538 - DNA, 26 bp, Homo sapiens
tcccagcgctggccgctctgccactc

SEQ ID NO: 16539 - DNA, 26 bp, Homo sapiens
cccagcgctggccgctctgccactcg

SEQ ID NO: 16540 - DNA, 26 bp, Homo sapiens
ccagcgctggccgctctgccactcgg

SEQ ID NO: 16541 - DNA, 26 bp, Homo sapiens
cagcgctggccgctctgccactcggt

SEQ ID NO: 16542 - DNA, 26 bp, Homo sapiens
agcgctggccgctctgccactcggtc

SEQ ID NO: 16543 - DNA, 26 bp, Homo sapiens
gcgctggccgctctgccactcggtct

SEQ ID NO: 16544 - DNA, 26 bp, Homo sapiens
cgctggccgctctgccactcggtctg

SEQ ID NO: 16545 - DNA, 26 bp, Homo sapiens
gctggccgctctgccactcggtctgc

SEQ ID NO: 16546 - DNA, 26 bp, Homo sapiens
ctggccgctctgccactcggtctgct

SEQ ID NO: 16547 - DNA, 26 bp, Homo sapiens
tggccgctctgccactcggtctgctg

SEQ ID NO: 16548 - DNA, 26 bp, Homo sapiens
ggccgctctgccactcggtctgctgg

SEQ ID NO: 16549 - DNA, 26 bp, Homo sapiens
gccgctctgccactcggtctgctggc

SEQ ID NO: 16550 - DNA, 26 bp, Homo sapiens
ccgctctgccactcggtctgctggcg

SEQ ID NO: 16551 - DNA, 26 bp, Homo sapiens
cgctctgccactcggtctgctggcgc

SEQ ID NO: 16552 - DNA, 26 bp, Homo sapiens
gctctgccactcggtctgctggcgca

SEQ ID NO: 16553 - DNA, 26 bp, Homo sapiens
ctctgccactcggtctgctggcgcag

SEQ ID NO: 16554 - DNA, 26 bp, Homo sapiens
tctgccactcggtctgctggcgcagc

SEQ ID NO: 16555 - DNA, 26 bp, Homo sapiens
ctgccactcggtctgctggcgcagct

SEQ ID NO: 16556 - DNA, 26 bp, Homo sapiens
tgccactcggtctgctggcgcagctc

SEQ ID NO: 16557 - DNA, 26 bp, Homo sapiens
gccactcggtctgctggcgcagctcg

SEQ ID NO: 16558 - DNA, 26 bp, Homo sapiens
ccactcggtctgctggcgcagctcgg

SEQ ID NO: 16559 - DNA, 26 bp, Homo sapiens
cactcggtctgctggcgcagctcggg

SEQ ID NO: 16560 - DNA, 26 bp, Homo sapiens
actcggtctgctggcgcagctcgggc

SEQ ID NO: 16561 - DNA, 26 bp, Homo sapiens
ctcggtctgctggcgcagctcgggct

SEQ ID NO: 16562 - DNA, 26 bp, Homo sapiens
tcggtctgctggcgcagctcgggctc

SEQ ID NO: 16563 - DNA, 26 bp, Homo sapiens
cggtctgctggcgcagctcgggctcc

SEQ ID NO: 16564 - DNA, 26 bp, Homo sapiens
ggtctgctggcgcagctcgggctccg

SEQ ID NO: 16565 - DNA, 26 bp, Homo sapiens
gtctgctggcgcagctcgggctccgg

SEQ ID NO: 16566 - DNA, 26 bp, Homo sapiens
tctgctggcgcagctcgggctccggc

SEQ ID NO: 16567 - DNA, 26 bp, Homo sapiens
ctgctggcgcagctcgggctccggct

SEQ ID NO: 16568 - DNA, 26 bp, Homo sapiens
tgctggcgcagctcgggctccggctc

SEQ ID NO: 16569 - DNA, 26 bp, Homo sapiens
gctggcgcagctcgggctccggctct

SEQ ID NO: 16570 - DNA, 26 bp, Homo sapiens
ctggcgcagctcgggctccggctctg

SEQ ID NO: 16571 - DNA, 26 bp, Homo sapiens
tggcgcagctcgggctccggctctgt

SEQ ID NO: 16572 - DNA, 26 bp, Homo sapiens
ggcgcagctcgggctccggctctgtc

SEQ ID NO: 16573 - DNA, 26 bp, Homo sapiens
gcgcagctcgggctccggctctgtct

SEQ ID NO: 16574 - DNA, 26 bp, Homo sapiens
cgcagctcgggctccggctctgtctc

SEQ ID NO: 16575 - DNA, 26 bp, Homo sapiens
gcagctcgggctccggctctgtctcc

SEQ ID NO: 16576 - DNA, 26 bp, Homo sapiens
cagctcgggctccggctctgtctcca

SEQ ID NO: 16577 - DNA, 26 bp, Homo sapiens
agctcgggctccggctctgtctccac

SEQ ID NO: 16578 - DNA, 26 bp, Homo sapiens
gctcgggctccggctctgtctccacc

SEQ ID NO: 16579 - DNA, 26 bp, Homo sapiens
ctcgggctccggctctgtctccaccg

SEQ ID NO: 16580 - DNA, 26 bp, Homo sapiens
tcgggctccggctctgtctccaccgc

SEQ ID NO: 16581 - DNA, 26 bp, Homo sapiens
cgggctccggctctgtctccaccgct

SEQ ID NO: 16582 - DNA, 26 bp, Homo sapiens
gggctccggctctgtctccaccgctt

SEQ ID NO: 16583 - DNA, 26 bp, Homo sapiens
ggctccggctctgtctccaccgcttg

SEQ ID NO: 16584 - DNA, 26 bp, Homo sapiens
gctccggctctgtctccaccgcttgc

SEQ ID NO: 16585 - DNA, 26 bp, Homo sapiens
ctccggctctgtctccaccgcttgct

SEQ ID NO: 16586 - DNA, 26 bp, Homo sapiens
tccggctctgtctccaccgcttgctc

SEQ ID NO: 16587 - DNA, 26 bp, Homo sapiens
ccggctctgtctccaccgcttgctcc

SEQ ID NO: 16588 - DNA, 26 bp, Homo sapiens
cggctctgtctccaccgcttgctcca

SEQ ID NO: 16589 - DNA, 26 bp, Homo sapiens
ggctctgtctccaccgcttgctccac

SEQ ID NO: 16590 - DNA, 26 bp, Homo sapiens
gctctgtctccaccgcttgctccacc

SEQ ID NO: 16591 - DNA, 26 bp, Homo sapiens
ctctgtctccaccgcttgctccacct

SEQ ID NO: 16592 - DNA, 26 bp, Homo sapiens
tctgtctccaccgcttgctccacctt

SEQ ID NO: 16593 - DNA, 26 bp, Homo sapiens
ctgtctccaccgcttgctccaccttg

SEQ ID NO: 16594 - DNA, 26 bp, Homo sapiens
tgtctccaccgcttgctccaccttgg

SEQ ID NO: 16595 - DNA, 26 bp, Homo sapiens
gtctccaccgcttgctccaccttggc

SEQ ID NO: 16596 - DNA, 26 bp, Homo sapiens
tctccaccgcttgctccaccttggcc

SEQ ID NO: 16597 - DNA, 26 bp, Homo sapiens
ctccaccgcttgctccaccttggcct

SEQ ID NO: 16598 - DNA, 26 bp, Homo sapiens
tccaccgcttgctccaccttggcctg

SEQ ID NO: 16599 - DNA, 26 bp, Homo sapiens
ccaccgcttgctccaccttggcctgg

SEQ ID NO: 16600 - DNA, 26 bp, Homo sapiens
caccgcttgctccaccttggcctggc

SEQ ID NO: 16601 - DNA, 26 bp, Homo sapiens
accgcttgctccaccttggcctggca

SEQ ID NO: 16602 - DNA, 26 bp, Homo sapiens
ccgcttgctccaccttggcctggcat

SEQ ID NO: 16603 - DNA, 26 bp, Homo sapiens
cgcttgctccaccttggcctggcatc

SEQ ID NO: 16604 - DNA, 26 bp, Homo sapiens
gcttgctccaccttggcctggcatcc

SEQ ID NO: 16605 - DNA, 26 bp, Homo sapiens
cttgctccaccttggcctggcatcct

SEQ ID NO: 16606 - DNA, 26 bp, Homo sapiens
ttgctccaccttggcctggcatcctg

SEQ ID NO: 16607 - DNA, 26 bp, Homo sapiens
tgctccaccttggcctggcatcctgc

SEQ ID NO: 16608 - DNA, 26 bp, Homo sapiens
gctccaccttggcctggcatcctgcc

SEQ ID NO: 16609 - DNA, 26 bp, Homo sapiens
ctccaccttggcctggcatcctgcca

SEQ ID NO: 16610 - DNA, 26 bp, Homo sapiens
tccaccttggcctggcatcctgccag

SEQ ID NO: 16611 - DNA, 26 bp, Homo sapiens
ccaccttggcctggcatcctgccagg

SEQ ID NO: 16612 - DNA, 26 bp, Homo sapiens
caccttggcctggcatcctgccagga

SEQ ID NO: 16613 - DNA, 26 bp, Homo sapiens
accttggcctggcatcctgccaggaa

SEQ ID NO: 16614 - DNA, 26 bp, Homo sapiens
ccttggcctggcatcctgccaggaat

SEQ ID NO: 16615 - DNA, 26 bp, Homo sapiens
cttggcctggcatcctgccaggaatg

SEQ ID NO: 16616 - DNA, 26 bp, Homo sapiens
ttggcctggcatcctgccaggaatgt

SEQ ID NO: 16617 - DNA, 26 bp, Homo sapiens
tggcctggcatcctgccaggaatgtg

SEQ ID NO: 16618 - DNA, 26 bp, Homo sapiens
ggcctggcatcctgccaggaatgtga

SEQ ID NO: 16619 - DNA, 26 bp, Homo sapiens
gcctggcatcctgccaggaatgtgac

SEQ ID NO: 16620 - DNA, 26 bp, Homo sapiens
cctggcatcctgccaggaatgtgacc

SEQ ID NO: 16621 - DNA, 26 bp, Homo sapiens
ctggcatcctgccaggaatgtgacca

SEQ ID NO: 16622 - DNA, 26 bp, Homo sapiens
tggcatcctgccaggaatgtgaccag

SEQ ID NO: 16623 - DNA, 26 bp, Homo sapiens
ggcatcctgccaggaatgtgaccagc

SEQ ID NO: 16624 - DNA, 26 bp, Homo sapiens
gcatcctgccaggaatgtgaccagca

SEQ ID NO: 16625 - DNA, 26 bp, Homo sapiens
catcctgccaggaatgtgaccagcaa

SEQ ID NO: 16626 - DNA, 26 bp, Homo sapiens
atcctgccaggaatgtgaccagcaac

SEQ ID NO: 16627 - DNA, 26 bp, Homo sapiens
tcctgccaggaatgtgaccagcaacg

SEQ ID NO: 16628 - DNA, 26 bp, Homo sapiens
cctgccaggaatgtgaccagcaacgc

SEQ ID NO: 16629 - DNA, 26 bp, Homo sapiens
ctgccaggaatgtgaccagcaacgca

SEQ ID NO: 16630 - DNA, 26 bp, Homo sapiens
tgccaggaatgtgaccagcaacgcag

SEQ ID NO: 16631 - DNA, 26 bp, Homo sapiens
gccaggaatgtgaccagcaacgcagc

SEQ ID NO: 16632 - DNA, 26 bp, Homo sapiens
ccaggaatgtgaccagcaacgcagcc

SEQ ID NO: 16633 - DNA, 26 bp, Homo sapiens
caggaatgtgaccagcaacgcagccc

SEQ ID NO: 16634 - DNA, 26 bp, Homo sapiens
aggaatgtgaccagcaacgcagccca

SEQ ID NO: 16635 - DNA, 26 bp, Homo sapiens
ggaatgtgaccagcaacgcagcccac

SEQ ID NO: 16636 - DNA, 26 bp, Homo sapiens
gaatgtgaccagcaacgcagcccaca

SEQ ID NO: 16637 - DNA, 26 bp, Homo sapiens
aatgtgaccagcaacgcagcccacag

SEQ ID NO: 16638 - DNA, 26 bp, Homo sapiens
atgtgaccagcaacgcagcccacaga

SEQ ID NO: 16639 - DNA, 26 bp, Homo sapiens
tgtgaccagcaacgcagcccacagaa

SEQ ID NO: 16640 - DNA, 26 bp, Homo sapiens
gtgaccagcaacgcagcccacagaac

SEQ ID NO: 16641 - DNA, 26 bp, Homo sapiens
tgaccagcaacgcagcccacagaacc

SEQ ID NO: 16642 - DNA, 26 bp, Homo sapiens
gaccagcaacgcagcccacagaacct

SEQ ID NO: 16643 - DNA, 26 bp, Homo sapiens
accagcaacgcagcccacagaacctt

SEQ ID NO: 16644 - DNA, 26 bp, Homo sapiens
ccagcaacgcagcccacagaaccttc

SEQ ID NO: 16645 - DNA, 26 bp, Homo sapiens
cagcaacgcagcccacagaaccttca

SEQ ID NO: 16646 - DNA, 26 bp, Homo sapiens
agcaacgcagcccacagaaccttcat

SEQ ID NO: 16647 - DNA, 26 bp, Homo sapiens
gcaacgcagcccacagaaccttcatc

SEQ ID NO: 16648 - DNA, 26 bp, Homo sapiens
caacgcagcccacagaaccttcatct

SEQ ID NO: 16649 - DNA, 26 bp, Homo sapiens
aacgcagcccacagaaccttcatctt

SEQ ID NO: 16650 - DNA, 26 bp, Homo sapiens
acgcagcccacagaaccttcatcttc

SEQ ID NO: 16651 - DNA, 26 bp, Homo sapiens
cgcagcccacagaaccttcatcttcc

SEQ ID NO: 16652 - DNA, 26 bp, Homo sapiens
gcagcccacagaaccttcatcttcct

SEQ ID NO: 16653 - DNA, 26 bp, Homo sapiens
cagcccacagaaccttcatcttcctg

SEQ ID NO: 16654 - DNA, 26 bp, Homo sapiens
agcccacagaaccttcatcttcctgc

SEQ ID NO: 16655 - DNA, 26 bp, Homo sapiens
gcccacagaaccttcatcttcctgcc

SEQ ID NO: 16656 - DNA, 26 bp, Homo sapiens
cccacagaaccttcatcttcctgcct

SEQ ID NO: 16657 - DNA, 26 bp, Homo sapiens
ccacagaaccttcatcttcctgcctg

SEQ ID NO: 16658 - DNA, 26 bp, Homo sapiens
cacagaaccttcatcttcctgcctgt

SEQ ID NO: 16659 - DNA, 26 bp, Homo sapiens
acagaaccttcatcttcctgcctgtg

SEQ ID NO: 16660 - DNA, 26 bp, Homo sapiens
cagaaccttcatcttcctgcctgtga

SEQ ID NO: 16661 - DNA, 26 bp, Homo sapiens
agaaccttcatcttcctgcctgtgat

SEQ ID NO: 16662 - DNA, 26 bp, Homo sapiens
gaaccttcatcttcctgcctgtgatt

SEQ ID NO: 16663 - DNA, 26 bp, Homo sapiens
aaccttcatcttcctgcctgtgattg

SEQ ID NO: 16664 - DNA, 26 bp, Homo sapiens
accttcatcttcctgcctgtgattgg

SEQ ID NO: 16665 - DNA, 26 bp, Homo sapiens
ccttcatcttcctgcctgtgattggc

SEQ ID NO: 16666 - DNA, 26 bp, Homo sapiens
cttcatcttcctgcctgtgattggcc

SEQ ID NO: 16667 - DNA, 26 bp, Homo sapiens
ttcatcttcctgcctgtgattggcca

SEQ ID NO: 16668 - DNA, 26 bp, Homo sapiens
tcatcttcctgcctgtgattggccag

SEQ ID NO: 16669 - DNA, 26 bp, Homo sapiens
catcttcctgcctgtgattggccagt

SEQ ID NO: 16670 - DNA, 26 bp, Homo sapiens
atcttcctgcctgtgattggccagtc

SEQ ID NO: 16671 - DNA, 26 bp, Homo sapiens
tcttcctgcctgtgattggccagtct

SEQ ID NO: 16672 - DNA, 26 bp, Homo sapiens
cttcctgcctgtgattggccagtctg

SEQ ID NO: 16673 - DNA, 26 bp, Homo sapiens
ttcctgcctgtgattggccagtctgg

SEQ ID NO: 16674 - DNA, 26 bp, Homo sapiens
tcctgcctgtgattggccagtctgga

SEQ ID NO: 16675 - DNA, 26 bp, Homo sapiens
cctgcctgtgattggccagtctggag

SEQ ID NO: 16676 - DNA, 26 bp, Homo sapiens
ctgcctgtgattggccagtctggagg

SEQ ID NO: 16677 - DNA, 26 bp, Homo sapiens
tgcctgtgattggccagtctggaggc

SEQ ID NO: 16678 - DNA, 26 bp, Homo sapiens
gcctgtgattggccagtctggaggcc

SEQ ID NO: 16679 - DNA, 26 bp, Homo sapiens
cctgtgattggccagtctggaggcca

SEQ ID NO: 16680 - DNA, 26 bp, Homo sapiens
ctgtgattggccagtctggaggccag

SEQ ID NO: 16681 - DNA, 26 bp, Homo sapiens
tgtgattggccagtctggaggccagg

SEQ ID NO: 16682 - DNA, 26 bp, Homo sapiens
gtgattggccagtctggaggccaggg

SEQ ID NO: 16683 - DNA, 26 bp, Homo sapiens
tgattggccagtctggaggccagggg

SEQ ID NO: 16684 - DNA, 26 bp, Homo sapiens
gattggccagtctggaggccaggggt

SEQ ID NO: 16685 - DNA, 26 bp, Homo sapiens
attggccagtctggaggccaggggtt

SEQ ID NO: 16686 - DNA, 26 bp, Homo sapiens
ttggccagtctggaggccaggggttc

SEQ ID NO: 16687 - DNA, 26 bp, Homo sapiens
tggccagtctggaggccaggggttcc

SEQ ID NO: 16688 - DNA, 26 bp, Homo sapiens
ggccagtctggaggccaggggttccc

SEQ ID NO: 16689 - DNA, 26 bp, Homo sapiens
gccagtctggaggccaggggttccca

SEQ ID NO: 16690 - DNA, 26 bp, Homo sapiens
ccagtctggaggccaggggttcccag

SEQ ID NO: 16691 - DNA, 26 bp, Homo sapiens
cagtctggaggccaggggttcccagg

SEQ ID NO: 16692 - DNA, 26 bp, Homo sapiens
agtctggaggccaggggttcccaggg

SEQ ID NO: 16693 - DNA, 26 bp, Homo sapiens
gtctggaggccaggggttcccagggt

SEQ ID NO: 16694 - DNA, 26 bp, Homo sapiens
tctggaggccaggggttcccagggtc

SEQ ID NO: 16695 - DNA, 26 bp, Homo sapiens
ctggaggccaggggttcccagggtcc

SEQ ID NO: 16696 - DNA, 26 bp, Homo sapiens
tggaggccaggggttcccagggtccc

SEQ ID NO: 16697 - DNA, 26 bp, Homo sapiens
ggaggccaggggttcccagggtccca

SEQ ID NO: 16698 - DNA, 26 bp, Homo sapiens
gaggccaggggttcccagggtcccag

SEQ ID NO: 16699 - DNA, 26 bp, Homo sapiens
aggccaggggttcccagggtcccagc

SEQ ID NO: 16700 - DNA, 26 bp, Homo sapiens
ggccaggggttcccagggtcccagct

SEQ ID NO: 16701 - DNA, 26 bp, Homo sapiens
gccaggggttcccagggtcccagctc

SEQ ID NO: 16702 - DNA, 26 bp, Homo sapiens
ccaggggttcccagggtcccagctct

SEQ ID NO: 16703 - DNA, 26 bp, Homo sapiens
caggggttcccagggtcccagctctt

SEQ ID NO: 16704 - DNA, 26 bp, Homo sapiens
aggggttcccagggtcccagctcttt

SEQ ID NO: 16705 - DNA, 26 bp, Homo sapiens
ggggttcccagggtcccagctctttc

SEQ ID NO: 16706 - DNA, 26 bp, Homo sapiens
gggttcccagggtcccagctctttct

SEQ ID NO: 16707 - DNA, 26 bp, Homo sapiens
ggttcccagggtcccagctctttcta

SEQ ID NO: 16708 - DNA, 26 bp, Homo sapiens
gttcccagggtcccagctctttctag

SEQ ID NO: 16709 - DNA, 26 bp, Homo sapiens
ttcccagggtcccagctctttctaga

SEQ ID NO: 16710 - DNA, 26 bp, Homo sapiens
tcccagggtcccagctctttctagag

SEQ ID NO: 16711 - DNA, 26 bp, Homo sapiens
cccagggtcccagctctttctagagg

SEQ ID NO: 16712 - DNA, 26 bp, Homo sapiens
ccagggtcccagctctttctagaggc

SEQ ID NO: 16713 - DNA, 26 bp, Homo sapiens
cagggtcccagctctttctagaggcc

SEQ ID NO: 16714 - DNA, 26 bp, Homo sapiens
agggtcccagctctttctagaggccc

SEQ ID NO: 16715 - DNA, 26 bp, Homo sapiens
gggtcccagctctttctagaggcccc

SEQ ID NO: 16716 - DNA, 26 bp, Homo sapiens
ggtcccagctctttctagaggcccct

SEQ ID NO: 16717 - DNA, 26 bp, Homo sapiens
gtcccagctctttctagaggcccctg

SEQ ID NO: 16718 - DNA, 26 bp, Homo sapiens
tcccagctctttctagaggcccctga

SEQ ID NO: 16719 - DNA, 26 bp, Homo sapiens
cccagctctttctagaggcccctgag

SEQ ID NO: 16720 - DNA, 26 bp, Homo sapiens
ccagctctttctagaggcccctgagc

SEQ ID NO: 16721 - DNA, 26 bp, Homo sapiens
cagctctttctagaggcccctgagct

SEQ ID NO: 16722 - DNA, 26 bp, Homo sapiens
agctctttctagaggcccctgagctc

SEQ ID NO: 16723 - DNA, 26 bp, Homo sapiens
gctctttctagaggcccctgagctca

SEQ ID NO: 16724 - DNA, 26 bp, Homo sapiens
ctctttctagaggcccctgagctcat

SEQ ID NO: 16725 - DNA, 26 bp, Homo sapiens
tctttctagaggcccctgagctcatc

SEQ ID NO: 16726 - DNA, 26 bp, Homo sapiens
ctttctagaggcccctgagctcatcc

SEQ ID NO: 16727 - DNA, 26 bp, Homo sapiens
tttctagaggcccctgagctcatccc

SEQ ID NO: 16728 - DNA, 26 bp, Homo sapiens
ttctagaggcccctgagctcatcccc

SEQ ID NO: 16729 - DNA, 26 bp, Homo sapiens
tctagaggcccctgagctcatccccg

SEQ ID NO: 16730 - DNA, 26 bp, Homo sapiens
ctagaggcccctgagctcatccccgt

SEQ ID NO: 16731 - DNA, 26 bp, Homo sapiens
tagaggcccctgagctcatccccgtg

SEQ ID NO: 16732 - DNA, 26 bp, Homo sapiens
agaggcccctgagctcatccccgtgc

SEQ ID NO: 16733 - DNA, 26 bp, Homo sapiens
gaggcccctgagctcatccccgtgcc

SEQ ID NO: 16734 - DNA, 26 bp, Homo sapiens
aggcccctgagctcatccccgtgccc

SEQ ID NO: 16735 - DNA, 26 bp, Homo sapiens
ggcccctgagctcatccccgtgcccc

SEQ ID NO: 16736 - DNA, 26 bp, Homo sapiens
gcccctgagctcatccccgtgccccc

SEQ ID NO: 16737 - DNA, 26 bp, Homo sapiens
cccctgagctcatccccgtgcccccg

SEQ ID NO: 16738 - DNA, 26 bp, Homo sapiens
ccctgagctcatccccgtgcccccga

SEQ ID NO: 16739 - DNA, 26 bp, Homo sapiens
cctgagctcatccccgtgcccccgac

SEQ ID NO: 16740 - DNA, 26 bp, Homo sapiens
ctgagctcatccccgtgcccccgact

SEQ ID NO: 16741 - DNA, 26 bp, Homo sapiens
tgagctcatccccgtgcccccgactg

SEQ ID NO: 16742 - DNA, 26 bp, Homo sapiens
gagctcatccccgtgcccccgactgc

SEQ ID NO: 16743 - DNA, 26 bp, Homo sapiens
agctcatccccgtgcccccgactgcg

SEQ ID NO: 16744 - DNA, 26 bp, Homo sapiens
gctcatccccgtgcccccgactgcgc

SEQ ID NO: 16745 - DNA, 26 bp, Homo sapiens
ctcatccccgtgcccccgactgcgct

SEQ ID NO: 16746 - DNA, 26 bp, Homo sapiens
tcatccccgtgcccccgactgcgctt

SEQ ID NO: 16747 - DNA, 26 bp, Homo sapiens
catccccgtgcccccgactgcgcttc

SEQ ID NO: 16748 - DNA, 26 bp, Homo sapiens
atccccgtgcccccgactgcgcttct

SEQ ID NO: 16749 - DNA, 26 bp, Homo sapiens
tccccgtgcccccgactgcgcttctc

SEQ ID NO: 16750 - DNA, 26 bp, Homo sapiens
ccccgtgcccccgactgcgcttctca

SEQ ID NO: 16751 - DNA, 26 bp, Homo sapiens
cccgtgcccccgactgcgcttctcac

SEQ ID NO: 16752 - DNA, 26 bp, Homo sapiens
ccgtgcccccgactgcgcttctcacc

SEQ ID NO: 16753 - DNA, 26 bp, Homo sapiens
cgtgcccccgactgcgcttctcaccg

SEQ ID NO: 16754 - DNA, 26 bp, Homo sapiens
gtgcccccgactgcgcttctcaccgg

SEQ ID NO: 16755 - DNA, 26 bp, Homo sapiens
tgcccccgactgcgcttctcaccggc

SEQ ID NO: 16756 - DNA, 26 bp, Homo sapiens
gcccccgactgcgcttctcaccggct

SEQ ID NO: 16757 - DNA, 26 bp, Homo sapiens
cccccgactgcgcttctcaccggctc

SEQ ID NO: 16758 - DNA, 26 bp, Homo sapiens
ccccgactgcgcttctcaccggctcc

SEQ ID NO: 16759 - DNA, 26 bp, Homo sapiens
cccgactgcgcttctcaccggctcct

SEQ ID NO: 16760 - DNA, 26 bp, Homo sapiens
ccgactgcgcttctcaccggctcctg

SEQ ID NO: 16761 - DNA, 26 bp, Homo sapiens
cgactgcgcttctcaccggctcctgg

SEQ ID NO: 16762 - DNA, 26 bp, Homo sapiens
gactgcgcttctcaccggctcctggg

SEQ ID NO: 16763 - DNA, 26 bp, Homo sapiens
actgcgcttctcaccggctcctgggg

SEQ ID NO: 16764 - DNA, 26 bp, Homo sapiens
ctgcgcttctcaccggctcctgggga

SEQ ID NO: 16765 - DNA, 26 bp, Homo sapiens
tgcgcttctcaccggctcctggggaa

SEQ ID NO: 16766 - DNA, 26 bp, Homo sapiens
gcgcttctcaccggctcctggggaag

SEQ ID NO: 16767 - DNA, 26 bp, Homo sapiens
cgcttctcaccggctcctggggaagg

SEQ ID NO: 16768 - DNA, 26 bp, Homo sapiens
gcttctcaccggctcctggggaagga

SEQ ID NO: 16769 - DNA, 26 bp, Homo sapiens
cttctcaccggctcctggggaaggac

SEQ ID NO: 16770 - DNA, 26 bp, Homo sapiens
ttctcaccggctcctggggaaggacg

SEQ ID NO: 16771 - DNA, 26 bp, Homo sapiens
tctcaccggctcctggggaaggacgt

SEQ ID NO: 16772 - DNA, 26 bp, Homo sapiens
ctcaccggctcctggggaaggacgtc

SEQ ID NO: 16773 - DNA, 26 bp, Homo sapiens
tcaccggctcctggggaaggacgtcc

SEQ ID NO: 16774 - DNA, 26 bp, Homo sapiens
caccggctcctggggaaggacgtcct

SEQ ID NO: 16775 - DNA, 26 bp, Homo sapiens
accggctcctggggaaggacgtcctt

SEQ ID NO: 16776 - DNA, 26 bp, Homo sapiens
ccggctcctggggaaggacgtccttc

SEQ ID NO: 16777 - DNA, 26 bp, Homo sapiens
cggctcctggggaaggacgtccttca

SEQ ID NO: 16778 - DNA, 26 bp, Homo sapiens
ggctcctggggaaggacgtccttcac

SEQ ID NO: 16779 - DNA, 26 bp, Homo sapiens
gctcctggggaaggacgtccttcacc

SEQ ID NO: 16780 - DNA, 26 bp, Homo sapiens
ctcctggggaaggacgtccttcacct

SEQ ID NO: 16781 - DNA, 26 bp, Homo sapiens
tcctggggaaggacgtccttcacctc

SEQ ID NO: 16782 - DNA, 26 bp, Homo sapiens
cctggggaaggacgtccttcacctcc

SEQ ID NO: 16783 - DNA, 26 bp, Homo sapiens
ctggggaaggacgtccttcacctccg

SEQ ID NO: 16784 - DNA, 26 bp, Homo sapiens
tggggaaggacgtccttcacctccgc

SEQ ID NO: 16785 - DNA, 26 bp, Homo sapiens
ggggaaggacgtccttcacctccgct

SEQ ID NO: 16786 - DNA, 26 bp, Homo sapiens
gggaaggacgtccttcacctccgctg

SEQ ID NO: 16787 - DNA, 26 bp, Homo sapiens
ggaaggacgtccttcacctccgctgg

SEQ ID NO: 16788 - DNA, 26 bp, Homo sapiens
gaaggacgtccttcacctccgctggg

SEQ ID NO: 16789 - DNA, 26 bp, Homo sapiens
aaggacgtccttcacctccgctgggg

SEQ ID NO: 16790 - DNA, 26 bp, Homo sapiens
aggacgtccttcacctccgctggggc

SEQ ID NO: 16791 - DNA, 26 bp, Homo sapiens
ggacgtccttcacctccgctggggct

SEQ ID NO: 16792 - DNA, 26 bp, Homo sapiens
gacgtccttcacctccgctggggctg

SEQ ID NO: 16793 - DNA, 26 bp, Homo sapiens
acgtccttcacctccgctggggctga

SEQ ID NO: 16794 - DNA, 26 bp, Homo sapiens
cgtccttcacctccgctggggctgag

SEQ ID NO: 16795 - DNA, 26 bp, Homo sapiens
gtccttcacctccgctggggctgagt

SEQ ID NO: 16796 - DNA, 26 bp, Homo sapiens
tccttcacctccgctggggctgagta

SEQ ID NO: 16797 - DNA, 26 bp, Homo sapiens
ccttcacctccgctggggctgagtag

SEQ ID NO: 16798 - DNA, 26 bp, Homo sapiens
tttcagctcagagagaagctttattc

SEQ ID NO: 16799 - DNA, 26 bp, Homo sapiens
ttcagctcagagagaagctttattcc

SEQ ID NO: 16800 - DNA, 26 bp, Homo sapiens
tcagctcagagagaagctttattcct

SEQ ID NO: 16801 - DNA, 26 bp, Homo sapiens
cagctcagagagaagctttattcctc

SEQ ID NO: 16802 - DNA, 26 bp, Homo sapiens
agctcagagagaagctttattcctca

SEQ ID NO: 16803 - DNA, 26 bp, Homo sapiens
gctcagagagaagctttattcctcag

SEQ ID NO: 16804 - DNA, 26 bp, Homo sapiens
ctcagagagaagctttattcctcagg

SEQ ID NO: 16805 - DNA, 26 bp, Homo sapiens
tcagagagaagctttattcctcaggg

SEQ ID NO: 16806 - DNA, 26 bp, Homo sapiens
cagagagaagctttattcctcagggc

SEQ ID NO: 16807 - DNA, 26 bp, Homo sapiens
agagagaagctttattcctcagggcc

SEQ ID NO: 16808 - DNA, 26 bp, Homo sapiens
gagagaagctttattcctcagggccc

SEQ ID NO: 16809 - DNA, 26 bp, Homo sapiens
agagaagctttattcctcagggccct

SEQ ID NO: 16810 - DNA, 26 bp, Homo sapiens
gagaagctttattcctcagggccctc

SEQ ID NO: 16811 - DNA, 26 bp, Homo sapiens
agaagctttattcctcagggccctcc

SEQ ID NO: 16812 - DNA, 26 bp, Homo sapiens
gaagctttattcctcagggccctcct

SEQ ID NO: 16813 - DNA, 26 bp, Homo sapiens
aagctttattcctcagggccctcctc

SEQ ID NO: 16814 - DNA, 26 bp, Homo sapiens
agctttattcctcagggccctcctca

SEQ ID NO: 16815 - DNA, 26 bp, Homo sapiens
gctttattcctcagggccctcctcag

SEQ ID NO: 16816 - DNA, 26 bp, Homo sapiens
ctttattcctcagggccctcctcagg

SEQ ID NO: 16817 - DNA, 26 bp, Homo sapiens
tttattcctcagggccctcctcaggg

SEQ ID NO: 16818 - DNA, 26 bp, Homo sapiens
ttattcctcagggccctcctcagggc

SEQ ID NO: 16819 - DNA, 26 bp, Homo sapiens
tattcctcagggccctcctcagggca

SEQ ID NO: 16820 - DNA, 26 bp, Homo sapiens
attcctcagggccctcctcagggcag

SEQ ID NO: 16821 - DNA, 26 bp, Homo sapiens
ttcctcagggccctcctcagggcagg

SEQ ID NO: 16822 - DNA, 26 bp, Homo sapiens
tcctcagggccctcctcagggcaggg

SEQ ID NO: 16823 - DNA, 26 bp, Homo sapiens
cctcagggccctcctcagggcagggg

SEQ ID NO: 16824 - DNA, 26 bp, Homo sapiens
ctcagggccctcctcagggcaggggc

SEQ ID NO: 16825 - DNA, 26 bp, Homo sapiens
tcagggccctcctcagggcaggggca

SEQ ID NO: 16826 - DNA, 26 bp, Homo sapiens
cagggccctcctcagggcaggggcag

SEQ ID NO: 16827 - DNA, 26 bp, Homo sapiens
agggccctcctcagggcaggggcagt

SEQ ID NO: 16828 - DNA, 26 bp, Homo sapiens
gggccctcctcagggcaggggcagta

SEQ ID NO: 16829 - DNA, 26 bp, Homo sapiens
ggccctcctcagggcaggggcagtag

SEQ ID NO: 16830 - DNA, 26 bp, Homo sapiens
gccctcctcagggcaggggcagtagg

SEQ ID NO: 16831 - DNA, 26 bp, Homo sapiens
ccctcctcagggcaggggcagtaggc

SEQ ID NO: 16832 - DNA, 26 bp, Homo sapiens
cctcctcagggcaggggcagtaggca

SEQ ID NO: 16833 - DNA, 26 bp, Homo sapiens
ctcctcagggcaggggcagtaggcag

SEQ ID NO: 16834 - DNA, 26 bp, Homo sapiens
tcctcagggcaggggcagtaggcagg

SEQ ID NO: 16835 - DNA, 26 bp, Homo sapiens
cctcagggcaggggcagtaggcagga

SEQ ID NO: 16836 - DNA, 26 bp, Homo sapiens
ctcagggcaggggcagtaggcaggaa

SEQ ID NO: 16837 - DNA, 26 bp, Homo sapiens
tcagggcaggggcagtaggcaggaag

SEQ ID NO: 16838 - DNA, 26 bp, Homo sapiens
cagggcaggggcagtaggcaggaagg

SEQ ID NO: 16839 - DNA, 26 bp, Homo sapiens
agggcaggggcagtaggcaggaaggc

SEQ ID NO: 16840 - DNA, 26 bp, Homo sapiens
gggcaggggcagtaggcaggaaggct

SEQ ID NO: 16841 - DNA, 26 bp, Homo sapiens
ggcaggggcagtaggcaggaaggctc

SEQ ID NO: 16842 - DNA, 26 bp, Homo sapiens
gcaggggcagtaggcaggaaggctca

SEQ ID NO: 16843 - DNA, 26 bp, Homo sapiens
caggggcagtaggcaggaaggctcag

SEQ ID NO: 16844 - DNA, 26 bp, Homo sapiens
aggggcagtaggcaggaaggctcagc

SEQ ID NO: 16845 - DNA, 26 bp, Homo sapiens
ggggcagtaggcaggaaggctcagct

SEQ ID NO: 16846 - DNA, 26 bp, Homo sapiens
gggcagtaggcaggaaggctcagctc

SEQ ID NO: 16847 - DNA, 26 bp, Homo sapiens
ggcagtaggcaggaaggctcagctct

SEQ ID NO: 16848 - DNA, 26 bp, Homo sapiens
gcagtaggcaggaaggctcagctctc

SEQ ID NO: 16849 - DNA, 26 bp, Homo sapiens
cagtaggcaggaaggctcagctctca

SEQ ID NO: 16850 - DNA, 26 bp, Homo sapiens
agtaggcaggaaggctcagctctcaa

SEQ ID NO: 16851 - DNA, 26 bp, Homo sapiens
gtaggcaggaaggctcagctctcaaa

SEQ ID NO: 16852 - DNA, 26 bp, Homo sapiens
taggcaggaaggctcagctctcaaac

SEQ ID NO: 16853 - DNA, 26 bp, Homo sapiens
aggcaggaaggctcagctctcaaact

SEQ ID NO: 16854 - DNA, 26 bp, Homo sapiens
ggcaggaaggctcagctctcaaactt

SEQ ID NO: 16855 - DNA, 26 bp, Homo sapiens
gcaggaaggctcagctctcaaacttt

SEQ ID NO: 16856 - DNA, 26 bp, Homo sapiens
caggaaggctcagctctcaaactttt

SEQ ID NO: 16857 - DNA, 26 bp, Homo sapiens
aggaaggctcagctctcaaacttttt

SEQ ID NO: 16858 - DNA, 26 bp, Homo sapiens
ggaaggctcagctctcaaactttttc

SEQ ID NO: 16859 - DNA, 26 bp, Homo sapiens
gaaggctcagctctcaaactttttct

SEQ ID NO: 16860 - DNA, 26 bp, Homo sapiens
aaggctcagctctcaaactttttctt

SEQ ID NO: 16861 - DNA, 26 bp, Homo sapiens
aggctcagctctcaaactttttcttg

SEQ ID NO: 16862 - DNA, 26 bp, Homo sapiens
ggctcagctctcaaactttttcttgc

SEQ ID NO: 16863 - DNA, 26 bp, Homo sapiens
gctcagctctcaaactttttcttgcg

SEQ ID NO: 16864 - DNA, 26 bp, Homo sapiens
ctcagctctcaaactttttcttgcgg

SEQ ID NO: 16865 - DNA, 26 bp, Homo sapiens
tcagctctcaaactttttcttgcggc

SEQ ID NO: 16866 - DNA, 26 bp, Homo sapiens
cagctctcaaactttttcttgcggcc

SEQ ID NO: 16867 - DNA, 26 bp, Homo sapiens
agctctcaaactttttcttgcggccc

SEQ ID NO: 16868 - DNA, 26 bp, Homo sapiens
gctctcaaactttttcttgcggccct

SEQ ID NO: 16869 - DNA, 26 bp, Homo sapiens
ctctcaaactttttcttgcggccctc

SEQ ID NO: 16870 - DNA, 26 bp, Homo sapiens
tctcaaactttttcttgcggccctcc

SEQ ID NO: 16871 - DNA, 26 bp, Homo sapiens
ctcaaactttttcttgcggccctcca

SEQ ID NO: 16872 - DNA, 26 bp, Homo sapiens
tcaaactttttcttgcggccctccat

SEQ ID NO: 16873 - DNA, 26 bp, Homo sapiens
caaactttttcttgcggccctccatt

SEQ ID NO: 16874 - DNA, 26 bp, Homo sapiens
aaactttttcttgcggccctccattc

SEQ ID NO: 16875 - DNA, 26 bp, Homo sapiens
aactttttcttgcggccctccattcc

SEQ ID NO: 16876 - DNA, 26 bp, Homo sapiens
actttttcttgcggccctccattcca

SEQ ID NO: 16877 - DNA, 26 bp, Homo sapiens
ctttttcttgcggccctccattccac

SEQ ID NO: 16878 - DNA, 26 bp, Homo sapiens
tttttcttgcggccctccattccact

SEQ ID NO: 16879 - DNA, 26 bp, Homo sapiens
ttttcttgcggccctccattccactc

SEQ ID NO: 16880 - DNA, 26 bp, Homo sapiens
tttcttgcggccctccattccactca

SEQ ID NO: 16881 - DNA, 26 bp, Homo sapiens
ttcttgcggccctccattccactcag

SEQ ID NO: 16882 - DNA, 26 bp, Homo sapiens
tcttgcggccctccattccactcagt

SEQ ID NO: 16883 - DNA, 26 bp, Homo sapiens
cttgcggccctccattccactcagtg

SEQ ID NO: 16884 - DNA, 26 bp, Homo sapiens
ttgcggccctccattccactcagtgc

SEQ ID NO: 16885 - DNA, 26 bp, Homo sapiens
tgcggccctccattccactcagtgca

SEQ ID NO: 16886 - DNA, 26 bp, Homo sapiens
gcggccctccattccactcagtgcat

SEQ ID NO: 16887 - DNA, 26 bp, Homo sapiens
cggccctccattccactcagtgcatc

SEQ ID NO: 16888 - DNA, 26 bp, Homo sapiens
ggccctccattccactcagtgcatcg

SEQ ID NO: 16889 - DNA, 26 bp, Homo sapiens
gccctccattccactcagtgcatcga

SEQ ID NO: 16890 - DNA, 26 bp, Homo sapiens
ccctccattccactcagtgcatcgat

SEQ ID NO: 16891 - DNA, 26 bp, Homo sapiens
cctccattccactcagtgcatcgatg

SEQ ID NO: 16892 - DNA, 26 bp, Homo sapiens
ctccattccactcagtgcatcgatgt

SEQ ID NO: 16893 - DNA, 26 bp, Homo sapiens
tccattccactcagtgcatcgatgtt

SEQ ID NO: 16894 - DNA, 26 bp, Homo sapiens
ccattccactcagtgcatcgatgttc

SEQ ID NO: 16895 - DNA, 26 bp, Homo sapiens
cattccactcagtgcatcgatgttct

SEQ ID NO: 16896 - DNA, 26 bp, Homo sapiens
attccactcagtgcatcgatgttctt

SEQ ID NO: 16897 - DNA, 26 bp, Homo sapiens
ttccactcagtgcatcgatgttcttg

SEQ ID NO: 16898 - DNA, 26 bp, Homo sapiens
tccactcagtgcatcgatgttcttgc

SEQ ID NO: 16899 - DNA, 26 bp, Homo sapiens
ccactcagtgcatcgatgttcttgcg

SEQ ID NO: 16900 - DNA, 26 bp, Homo sapiens
cactcagtgcatcgatgttcttgcgc

SEQ ID NO: 16901 - DNA, 26 bp, Homo sapiens
actcagtgcatcgatgttcttgcgcc

SEQ ID NO: 16902 - DNA, 26 bp, Homo sapiens
ctcagtgcatcgatgttcttgcgcca

SEQ ID NO: 16903 - DNA, 26 bp, Homo sapiens
tcagtgcatcgatgttcttgcgccag

SEQ ID NO: 16904 - DNA, 26 bp, Homo sapiens
cagtgcatcgatgttcttgcgccagt

SEQ ID NO: 16905 - DNA, 26 bp, Homo sapiens
agtgcatcgatgttcttgcgccagtc

SEQ ID NO: 16906 - DNA, 26 bp, Homo sapiens
gtgcatcgatgttcttgcgccagtct

SEQ ID NO: 16907 - DNA, 26 bp, Homo sapiens
tgcatcgatgttcttgcgccagtctc

SEQ ID NO: 16908 - DNA, 26 bp, Homo sapiens
gcatcgatgttcttgcgccagtctcc

SEQ ID NO: 16909 - DNA, 26 bp, Homo sapiens
catcgatgttcttgcgccagtctccc

SEQ ID NO: 16910 - DNA, 26 bp, Homo sapiens
atcgatgttcttgcgccagtctccca

SEQ ID NO: 16911 - DNA, 26 bp, Homo sapiens
tcgatgttcttgcgccagtctcccac

SEQ ID NO: 16912 - DNA, 26 bp, Homo sapiens
cgatgttcttgcgccagtctcccacc

SEQ ID NO: 16913 - DNA, 26 bp, Homo sapiens
gatgttcttgcgccagtctcccacct

SEQ ID NO: 16914 - DNA, 26 bp, Homo sapiens
atgttcttgcgccagtctcccacctc

SEQ ID NO: 16915 - DNA, 26 bp, Homo sapiens
tgttcttgcgccagtctcccacctcc

SEQ ID NO: 16916 - DNA, 26 bp, Homo sapiens
gttcttgcgccagtctcccacctccc

SEQ ID NO: 16917 - DNA, 26 bp, Homo sapiens
ttcttgcgccagtctcccacctcccg

SEQ ID NO: 16918 - DNA, 26 bp, Homo sapiens
tcttgcgccagtctcccacctcccgg

SEQ ID NO: 16919 - DNA, 26 bp, Homo sapiens
cttgcgccagtctcccacctcccggt

SEQ ID NO: 16920 - DNA, 26 bp, Homo sapiens
ttgcgccagtctcccacctcccggtt

SEQ ID NO: 16921 - DNA, 26 bp, Homo sapiens
tgcgccagtctcccacctcccggttt

SEQ ID NO: 16922 - DNA, 26 bp, Homo sapiens
gcgccagtctcccacctcccggtttt

SEQ ID NO: 16923 - DNA, 26 bp, Homo sapiens
cgccagtctcccacctcccggttttc

SEQ ID NO: 16924 - DNA, 26 bp, Homo sapiens
gccagtctcccacctcccggttttcc

SEQ ID NO: 16925 - DNA, 26 bp, Homo sapiens
ccagtctcccacctcccggttttcct

SEQ ID NO: 16926 - DNA, 26 bp, Homo sapiens
cagtctcccacctcccggttttcctt

SEQ ID NO: 16927 - DNA, 26 bp, Homo sapiens
agtctcccacctcccggttttccttc

SEQ ID NO: 16928 - DNA, 26 bp, Homo sapiens
gtctcccacctcccggttttccttct

SEQ ID NO: 16929 - DNA, 26 bp, Homo sapiens
tctcccacctcccggttttccttctc

SEQ ID NO: 16930 - DNA, 26 bp, Homo sapiens
ctcccacctcccggttttccttctcg

SEQ ID NO: 16931 - DNA, 26 bp, Homo sapiens
tcccacctcccggttttccttctcgg

SEQ ID NO: 16932 - DNA, 26 bp, Homo sapiens
cccacctcccggttttccttctcggt

SEQ ID NO: 16933 - DNA, 26 bp, Homo sapiens
ccacctcccggttttccttctcggtg

SEQ ID NO: 16934 - DNA, 26 bp, Homo sapiens
cacctcccggttttccttctcggtgt

SEQ ID NO: 16935 - DNA, 26 bp, Homo sapiens
acctcccggttttccttctcggtgtc

SEQ ID NO: 16936 - DNA, 26 bp, Homo sapiens
cctcccggttttccttctcggtgtcc

SEQ ID NO: 16937 - DNA, 26 bp, Homo sapiens
ctcccggttttccttctcggtgtcct

SEQ ID NO: 16938 - DNA, 26 bp, Homo sapiens
tcccggttttccttctcggtgtcctc

SEQ ID NO: 16939 - DNA, 26 bp, Homo sapiens
cccggttttccttctcggtgtcctcc

SEQ ID NO: 16940 - DNA, 26 bp, Homo sapiens
ccggttttccttctcggtgtcctcct

SEQ ID NO: 16941 - DNA, 26 bp, Homo sapiens
cggttttccttctcggtgtcctcctt

SEQ ID NO: 16942 - DNA, 26 bp, Homo sapiens
ggttttccttctcggtgtcctccttc

SEQ ID NO: 16943 - DNA, 26 bp, Homo sapiens
gttttccttctcggtgtcctccttct

SEQ ID NO: 16944 - DNA, 26 bp, Homo sapiens
ttttccttctcggtgtcctccttctt

SEQ ID NO: 16945 - DNA, 26 bp, Homo sapiens
tttccttctcggtgtcctccttcttc

SEQ ID NO: 16946 - DNA, 26 bp, Homo sapiens
ttccttctcggtgtcctccttcttca

SEQ ID NO: 16947 - DNA, 26 bp, Homo sapiens
tccttctcggtgtcctccttcttcac

SEQ ID NO: 16948 - DNA, 26 bp, Homo sapiens
ccttctcggtgtcctccttcttcacc

SEQ ID NO: 16949 - DNA, 26 bp, Homo sapiens
cttctcggtgtcctccttcttcacct

SEQ ID NO: 16950 - DNA, 26 bp, Homo sapiens
ttctcggtgtcctccttcttcacctg

SEQ ID NO: 16951 - DNA, 26 bp, Homo sapiens
tctcggtgtcctccttcttcacctgc

SEQ ID NO: 16952 - DNA, 26 bp, Homo sapiens
ctcggtgtcctccttcttcacctgct

SEQ ID NO: 16953 - DNA, 26 bp, Homo sapiens
tcggtgtcctccttcttcacctgctt

SEQ ID NO: 16954 - DNA, 26 bp, Homo sapiens
cggtgtcctccttcttcacctgcttg

SEQ ID NO: 16955 - DNA, 26 bp, Homo sapiens
ggtgtcctccttcttcacctgcttga

SEQ ID NO: 16956 - DNA, 26 bp, Homo sapiens
gtgtcctccttcttcacctgcttgag

SEQ ID NO: 16957 - DNA, 26 bp, Homo sapiens
tgtcctccttcttcacctgcttgagg

SEQ ID NO: 16958 - DNA, 26 bp, Homo sapiens
gtcctccttcttcacctgcttgaggt

SEQ ID NO: 16959 - DNA, 26 bp, Homo sapiens
tcctccttcttcacctgcttgaggtg

SEQ ID NO: 16960 - DNA, 26 bp, Homo sapiens
cctccttcttcacctgcttgaggtgg

SEQ ID NO: 16961 - DNA, 26 bp, Homo sapiens
ctccttcttcacctgcttgaggtggg

SEQ ID NO: 16962 - DNA, 26 bp, Homo sapiens
tccttcttcacctgcttgaggtgggc

SEQ ID NO: 16963 - DNA, 26 bp, Homo sapiens
ccttcttcacctgcttgaggtgggcc

SEQ ID NO: 16964 - DNA, 26 bp, Homo sapiens
cttcttcacctgcttgaggtgggccc

SEQ ID NO: 16965 - DNA, 26 bp, Homo sapiens
ttcttcacctgcttgaggtgggcccg

SEQ ID NO: 16966 - DNA, 26 bp, Homo sapiens
tcttcacctgcttgaggtgggcccgc

SEQ ID NO: 16967 - DNA, 26 bp, Homo sapiens
cttcacctgcttgaggtgggcccgca

SEQ ID NO: 16968 - DNA, 26 bp, Homo sapiens
ttcacctgcttgaggtgggcccgcag

SEQ ID NO: 16969 - DNA, 26 bp, Homo sapiens
tcacctgcttgaggtgggcccgcagg

SEQ ID NO: 16970 - DNA, 26 bp, Homo sapiens
cacctgcttgaggtgggcccgcaggt

SEQ ID NO: 16971 - DNA, 26 bp, Homo sapiens
acctgcttgaggtgggcccgcaggtc

SEQ ID NO: 16972 - DNA, 26 bp, Homo sapiens
cctgcttgaggtgggcccgcaggtcc

SEQ ID NO: 16973 - DNA, 26 bp, Homo sapiens
ctgcttgaggtgggcccgcaggtcca

SEQ ID NO: 16974 - DNA, 26 bp, Homo sapiens
tgcttgaggtgggcccgcaggtccag

SEQ ID NO: 16975 - DNA, 26 bp, Homo sapiens
gcttgaggtgggcccgcaggtccagg

SEQ ID NO: 16976 - DNA, 26 bp, Homo sapiens
cttgaggtgggcccgcaggtccaggg

SEQ ID NO: 16977 - DNA, 26 bp, Homo sapiens
ttgaggtgggcccgcaggtccaggga

SEQ ID NO: 16978 - DNA, 26 bp, Homo sapiens
tgaggtgggcccgcaggtccagggac

SEQ ID NO: 16979 - DNA, 26 bp, Homo sapiens
gaggtgggcccgcaggtccagggact

SEQ ID NO: 16980 - DNA, 26 bp, Homo sapiens
aggtgggcccgcaggtccagggactc

SEQ ID NO: 16981 - DNA, 26 bp, Homo sapiens
ggtgggcccgcaggtccagggactcc

SEQ ID NO: 16982 - DNA, 26 bp, Homo sapiens
gtgggcccgcaggtccagggactcct

SEQ ID NO: 16983 - DNA, 26 bp, Homo sapiens
tgggcccgcaggtccagggactcctt

SEQ ID NO: 16984 - DNA, 26 bp, Homo sapiens
gggcccgcaggtccagggactcctta

SEQ ID NO: 16985 - DNA, 26 bp, Homo sapiens
ggcccgcaggtccagggactccttag

SEQ ID NO: 16986 - DNA, 26 bp, Homo sapiens
gcccgcaggtccagggactccttagc

SEQ ID NO: 16987 - DNA, 26 bp, Homo sapiens
cccgcaggtccagggactccttagcc

SEQ ID NO: 16988 - DNA, 26 bp, Homo sapiens
ccgcaggtccagggactccttagccc

SEQ ID NO: 16989 - DNA, 26 bp, Homo sapiens
cgcaggtccagggactccttagcccg

SEQ ID NO: 16990 - DNA, 26 bp, Homo sapiens
gcaggtccagggactccttagcccgg

SEQ ID NO: 16991 - DNA, 26 bp, Homo sapiens
caggtccagggactccttagcccggg

SEQ ID NO: 16992 - DNA, 26 bp, Homo sapiens
aggtccagggactccttagcccgggc

SEQ ID NO: 16993 - DNA, 26 bp, Homo sapiens
ggtccagggactccttagcccgggcc

SEQ ID NO: 16994 - DNA, 26 bp, Homo sapiens
gtccagggactccttagcccgggccc

SEQ ID NO: 16995 - DNA, 26 bp, Homo sapiens
tccagggactccttagcccgggcccc

SEQ ID NO: 16996 - DNA, 26 bp, Homo sapiens
ccagggactccttagcccgggccccc

SEQ ID NO: 16997 - DNA, 26 bp, Homo sapiens
cagggactccttagcccgggccccca

SEQ ID NO: 16998 - DNA, 26 bp, Homo sapiens
agggactccttagcccgggcccccag

SEQ ID NO: 16999 - DNA, 26 bp, Homo sapiens
gggactccttagcccgggcccccagc

SEQ ID NO: 17000 - DNA, 26 bp, Homo sapiens
ggactccttagcccgggcccccagca

SEQ ID NO: 17001 - DNA, 26 bp, Homo sapiens
gactccttagcccgggcccccagcag

SEQ ID NO: 17002 - DNA, 26 bp, Homo sapiens
actccttagcccgggcccccagcagc

SEQ ID NO: 17003 - DNA, 26 bp, Homo sapiens
ctccttagcccgggcccccagcagcg

SEQ ID NO: 17004 - DNA, 26 bp, Homo sapiens
tccttagcccgggcccccagcagcgc

SEQ ID NO: 17005 - DNA, 26 bp, Homo sapiens
ccttagcccgggcccccagcagcgcc

SEQ ID NO: 17006 - DNA, 26 bp, Homo sapiens
cttagcccgggcccccagcagcgcct

SEQ ID NO: 17007 - DNA, 26 bp, Homo sapiens
ttagcccgggcccccagcagcgcctg

SEQ ID NO: 17008 - DNA, 26 bp, Homo sapiens
tagcccgggcccccagcagcgcctgc

SEQ ID NO: 17009 - DNA, 26 bp, Homo sapiens
agcccgggcccccagcagcgcctgca

SEQ ID NO: 17010 - DNA, 26 bp, Homo sapiens
gcccgggcccccagcagcgcctgcat

SEQ ID NO: 17011 - DNA, 26 bp, Homo sapiens
cccgggcccccagcagcgcctgcatc

SEQ ID NO: 17012 - DNA, 26 bp, Homo sapiens
ccgggcccccagcagcgcctgcatca

SEQ ID NO: 17013 - DNA, 26 bp, Homo sapiens
cgggcccccagcagcgcctgcatcat

SEQ ID NO: 17014 - DNA, 26 bp, Homo sapiens
gggcccccagcagcgcctgcatcatg

SEQ ID NO: 17015 - DNA, 26 bp, Homo sapiens
ggcccccagcagcgcctgcatcatgg

SEQ ID NO: 17016 - DNA, 26 bp, Homo sapiens
gcccccagcagcgcctgcatcatggc

SEQ ID NO: 17017 - DNA, 26 bp, Homo sapiens
cccccagcagcgcctgcatcatggca

SEQ ID NO: 17018 - DNA, 26 bp, Homo sapiens
ccccagcagcgcctgcatcatggcat

SEQ ID NO: 17019 - DNA, 26 bp, Homo sapiens
cccagcagcgcctgcatcatggcatc

SEQ ID NO: 17020 - DNA, 26 bp, Homo sapiens
ccagcagcgcctgcatcatggcatct

SEQ ID NO: 17021 - DNA, 26 bp, Homo sapiens
cagcagcgcctgcatcatggcatctg

SEQ ID NO: 17022 - DNA, 26 bp, Homo sapiens
agcagcgcctgcatcatggcatctgc

SEQ ID NO: 17023 - DNA, 26 bp, Homo sapiens
gcagcgcctgcatcatggcatctgca

SEQ ID NO: 17024 - DNA, 26 bp, Homo sapiens
cagcgcctgcatcatggcatctgcag

SEQ ID NO: 17025 - DNA, 26 bp, Homo sapiens
agcgcctgcatcatggcatctgcaga

SEQ ID NO: 17026 - DNA, 26 bp, Homo sapiens
gcgcctgcatcatggcatctgcagag

SEQ ID NO: 17027 - DNA, 26 bp, Homo sapiens
cgcctgcatcatggcatctgcagaga

SEQ ID NO: 17028 - DNA, 26 bp, Homo sapiens
gcctgcatcatggcatctgcagagat

SEQ ID NO: 17029 - DNA, 26 bp, Homo sapiens
cctgcatcatggcatctgcagagatc

SEQ ID NO: 17030 - DNA, 26 bp, Homo sapiens
ctgcatcatggcatctgcagagatcc

SEQ ID NO: 17031 - DNA, 26 bp, Homo sapiens
tgcatcatggcatctgcagagatcct

SEQ ID NO: 17032 - DNA, 26 bp, Homo sapiens
gcatcatggcatctgcagagatcctc

SEQ ID NO: 17033 - DNA, 26 bp, Homo sapiens
catcatggcatctgcagagatcctca

SEQ ID NO: 17034 - DNA, 26 bp, Homo sapiens
atcatggcatctgcagagatcctcac

SEQ ID NO: 17035 - DNA, 26 bp, Homo sapiens
tcatggcatctgcagagatcctcact

SEQ ID NO: 17036 - DNA, 26 bp, Homo sapiens
catggcatctgcagagatcctcactc

SEQ ID NO: 17037 - DNA, 26 bp, Homo sapiens
atggcatctgcagagatcctcactct

SEQ ID NO: 17038 - DNA, 26 bp, Homo sapiens
tggcatctgcagagatcctcactctc

SEQ ID NO: 17039 - DNA, 26 bp, Homo sapiens
ggcatctgcagagatcctcactctcc

SEQ ID NO: 17040 - DNA, 26 bp, Homo sapiens
gcatctgcagagatcctcactctccg

SEQ ID NO: 17041 - DNA, 26 bp, Homo sapiens
catctgcagagatcctcactctccgc

SEQ ID NO: 17042 - DNA, 26 bp, Homo sapiens
atctgcagagatcctcactctccgca

SEQ ID NO: 17043 - DNA, 26 bp, Homo sapiens
tctgcagagatcctcactctccgcag

SEQ ID NO: 17044 - DNA, 26 bp, Homo sapiens
ctgcagagatcctcactctccgcagg

SEQ ID NO: 17045 - DNA, 26 bp, Homo sapiens
tgcagagatcctcactctccgcaggg

SEQ ID NO: 17046 - DNA, 26 bp, Homo sapiens
gcagagatcctcactctccgcagggt

SEQ ID NO: 17047 - DNA, 26 bp, Homo sapiens
cagagatcctcactctccgcagggtg

SEQ ID NO: 17048 - DNA, 26 bp, Homo sapiens
agagatcctcactctccgcagggtgg

SEQ ID NO: 17049 - DNA, 26 bp, Homo sapiens
gagatcctcactctccgcagggtggg

SEQ ID NO: 17050 - DNA, 26 bp, Homo sapiens
agatcctcactctccgcagggtgggc

SEQ ID NO: 17051 - DNA, 26 bp, Homo sapiens
gatcctcactctccgcagggtgggcc

SEQ ID NO: 17052 - DNA, 26 bp, Homo sapiens
atcctcactctccgcagggtgggccg

SEQ ID NO: 17053 - DNA, 26 bp, Homo sapiens
tcctcactctccgcagggtgggccgc

SEQ ID NO: 17054 - DNA, 26 bp, Homo sapiens
cctcactctccgcagggtgggccgct

SEQ ID NO: 17055 - DNA, 26 bp, Homo sapiens
ctcactctccgcagggtgggccgctt

SEQ ID NO: 17056 - DNA, 26 bp, Homo sapiens
tcactctccgcagggtgggccgctta

SEQ ID NO: 17057 - DNA, 26 bp, Homo sapiens
cactctccgcagggtgggccgcttaa

SEQ ID NO: 17058 - DNA, 26 bp, Homo sapiens
actctccgcagggtgggccgcttaaa

SEQ ID NO: 17059 - DNA, 26 bp, Homo sapiens
ctctccgcagggtgggccgcttaaac

SEQ ID NO: 17060 - DNA, 26 bp, Homo sapiens
tctccgcagggtgggccgcttaaact

SEQ ID NO: 17061 - DNA, 26 bp, Homo sapiens
ctccgcagggtgggccgcttaaactt

SEQ ID NO: 17062 - DNA, 26 bp, Homo sapiens
tccgcagggtgggccgcttaaacttg

SEQ ID NO: 17063 - DNA, 26 bp, Homo sapiens
ccgcagggtgggccgcttaaacttgc

SEQ ID NO: 17064 - DNA, 26 bp, Homo sapiens
cgcagggtgggccgcttaaacttgcc

SEQ ID NO: 17065 - DNA, 26 bp, Homo sapiens
gcagggtgggccgcttaaacttgcct

SEQ ID NO: 17066 - DNA, 26 bp, Homo sapiens
cagggtgggccgcttaaacttgcctc

SEQ ID NO: 17067 - DNA, 26 bp, Homo sapiens
agggtgggccgcttaaacttgcctcg

SEQ ID NO: 17068 - DNA, 26 bp, Homo sapiens
gggtgggccgcttaaacttgcctcga

SEQ ID NO: 17069 - DNA, 26 bp, Homo sapiens
ggtgggccgcttaaacttgcctcgaa

SEQ ID NO: 17070 - DNA, 26 bp, Homo sapiens
gtgggccgcttaaacttgcctcgaag

SEQ ID NO: 17071 - DNA, 26 bp, Homo sapiens
tgggccgcttaaacttgcctcgaagg

SEQ ID NO: 17072 - DNA, 26 bp, Homo sapiens
gggccgcttaaacttgcctcgaaggt

SEQ ID NO: 17073 - DNA, 26 bp, Homo sapiens
ggccgcttaaacttgcctcgaaggtc

SEQ ID NO: 17074 - DNA, 26 bp, Homo sapiens
gccgcttaaacttgcctcgaaggtca

SEQ ID NO: 17075 - DNA, 26 bp, Homo sapiens
ccgcttaaacttgcctcgaaggtcaa

SEQ ID NO: 17076 - DNA, 26 bp, Homo sapiens
cgcttaaacttgcctcgaaggtcaaa

SEQ ID NO: 17077 - DNA, 26 bp, Homo sapiens
gcttaaacttgcctcgaaggtcaaag

SEQ ID NO: 17078 - DNA, 26 bp, Homo sapiens
cttaaacttgcctcgaaggtcaaaga

SEQ ID NO: 17079 - DNA, 26 bp, Homo sapiens
ttaaacttgcctcgaaggtcaaagat

SEQ ID NO: 17080 - DNA, 26 bp, Homo sapiens
taaacttgcctcgaaggtcaaagatc

SEQ ID NO: 17081 - DNA, 26 bp, Homo sapiens
aaacttgcctcgaaggtcaaagatct

SEQ ID NO: 17082 - DNA, 26 bp, Homo sapiens
aacttgcctcgaaggtcaaagatctt

SEQ ID NO: 17083 - DNA, 26 bp, Homo sapiens
acttgcctcgaaggtcaaagatcttc

SEQ ID NO: 17084 - DNA, 26 bp, Homo sapiens
cttgcctcgaaggtcaaagatcttct

SEQ ID NO: 17085 - DNA, 26 bp, Homo sapiens
ttgcctcgaaggtcaaagatcttctg

SEQ ID NO: 17086 - DNA, 26 bp, Homo sapiens
tgcctcgaaggtcaaagatcttctga

SEQ ID NO: 17087 - DNA, 26 bp, Homo sapiens
gcctcgaaggtcaaagatcttctgag

SEQ ID NO: 17088 - DNA, 26 bp, Homo sapiens
cctcgaaggtcaaagatcttctgagt

SEQ ID NO: 17089 - DNA, 26 bp, Homo sapiens
ctcgaaggtcaaagatcttctgagtc

SEQ ID NO: 17090 - DNA, 26 bp, Homo sapiens
tcgaaggtcaaagatcttctgagtca

SEQ ID NO: 17091 - DNA, 26 bp, Homo sapiens
cgaaggtcaaagatcttctgagtcag

SEQ ID NO: 17092 - DNA, 26 bp, Homo sapiens
gaaggtcaaagatcttctgagtcaga

SEQ ID NO: 17093 - DNA, 26 bp, Homo sapiens
aaggtcaaagatcttctgagtcagat

SEQ ID NO: 17094 - DNA, 26 bp, Homo sapiens
aggtcaaagatcttctgagtcagatc

SEQ ID NO: 17095 - DNA, 26 bp, Homo sapiens
ggtcaaagatcttctgagtcagatct

SEQ ID NO: 17096 - DNA, 26 bp, Homo sapiens
gtcaaagatcttctgagtcagatctg

SEQ ID NO: 17097 - DNA, 26 bp, Homo sapiens
tcaaagatcttctgagtcagatctgc

SEQ ID NO: 17098 - DNA, 26 bp, Homo sapiens
caaagatcttctgagtcagatctgca

SEQ ID NO: 17099 - DNA, 26 bp, Homo sapiens
aaagatcttctgagtcagatctgcaa

SEQ ID NO: 17100 - DNA, 26 bp, Homo sapiens
aagatcttctgagtcagatctgcaat

SEQ ID NO: 17101 - DNA, 26 bp, Homo sapiens
agatcttctgagtcagatctgcaatc

SEQ ID NO: 17102 - DNA, 26 bp, Homo sapiens
gatcttctgagtcagatctgcaatct

SEQ ID NO: 17103 - DNA, 26 bp, Homo sapiens
atcttctgagtcagatctgcaatctc

SEQ ID NO: 17104 - DNA, 26 bp, Homo sapiens
tcttctgagtcagatctgcaatctcc

SEQ ID NO: 17105 - DNA, 26 bp, Homo sapiens
cttctgagtcagatctgcaatctccg

SEQ ID NO: 17106 - DNA, 26 bp, Homo sapiens
ttctgagtcagatctgcaatctccgt

SEQ ID NO: 17107 - DNA, 26 bp, Homo sapiens
tctgagtcagatctgcaatctccgtg

SEQ ID NO: 17108 - DNA, 26 bp, Homo sapiens
ctgagtcagatctgcaatctccgtga

SEQ ID NO: 17109 - DNA, 26 bp, Homo sapiens
tgagtcagatctgcaatctccgtgat

SEQ ID NO: 17110 - DNA, 26 bp, Homo sapiens
gagtcagatctgcaatctccgtgatg

SEQ ID NO: 17111 - DNA, 26 bp, Homo sapiens
agtcagatctgcaatctccgtgatgt

SEQ ID NO: 17112 - DNA, 26 bp, Homo sapiens
gtcagatctgcaatctccgtgatgtt

SEQ ID NO: 17113 - DNA, 26 bp, Homo sapiens
tcagatctgcaatctccgtgatgttc

SEQ ID NO: 17114 - DNA, 26 bp, Homo sapiens
cagatctgcaatctccgtgatgttct

SEQ ID NO: 17115 - DNA, 26 bp, Homo sapiens
agatctgcaatctccgtgatgttctt

SEQ ID NO: 17116 - DNA, 26 bp, Homo sapiens
gatctgcaatctccgtgatgttcttg

SEQ ID NO: 17117 - DNA, 26 bp, Homo sapiens
atctgcaatctccgtgatgttcttgg

SEQ ID NO: 17118 - DNA, 26 bp, Homo sapiens
tctgcaatctccgtgatgttcttggt

SEQ ID NO: 17119 - DNA, 26 bp, Homo sapiens
ctgcaatctccgtgatgttcttggtg

SEQ ID NO: 17120 - DNA, 26 bp, Homo sapiens
tgcaatctccgtgatgttcttggtga

SEQ ID NO: 17121 - DNA, 26 bp, Homo sapiens
gcaatctccgtgatgttcttggtgac

SEQ ID NO: 17122 - DNA, 26 bp, Homo sapiens
caatctccgtgatgttcttggtgact

SEQ ID NO: 17123 - DNA, 26 bp, Homo sapiens
aatctccgtgatgttcttggtgactt

SEQ ID NO: 17124 - DNA, 26 bp, Homo sapiens
atctccgtgatgttcttggtgacttt

SEQ ID NO: 17125 - DNA, 26 bp, Homo sapiens
tctccgtgatgttcttggtgactttt

SEQ ID NO: 17126 - DNA, 26 bp, Homo sapiens
ctccgtgatgttcttggtgacttttg

SEQ ID NO: 17127 - DNA, 26 bp, Homo sapiens
tccgtgatgttcttggtgacttttgc

SEQ ID NO: 17128 - DNA, 26 bp, Homo sapiens
ccgtgatgttcttggtgacttttgcc

SEQ ID NO: 17129 - DNA, 26 bp, Homo sapiens
cgtgatgttcttggtgacttttgcct

SEQ ID NO: 17130 - DNA, 26 bp, Homo sapiens
gtgatgttcttggtgacttttgcctc

SEQ ID NO: 17131 - DNA, 26 bp, Homo sapiens
tgatgttcttggtgacttttgcctct

SEQ ID NO: 17132 - DNA, 26 bp, Homo sapiens
gatgttcttggtgacttttgcctcta

SEQ ID NO: 17133 - DNA, 26 bp, Homo sapiens
atgttcttggtgacttttgcctctat

SEQ ID NO: 17134 - DNA, 26 bp, Homo sapiens
tgttcttggtgacttttgcctctatg

SEQ ID NO: 17135 - DNA, 26 bp, Homo sapiens
gttcttggtgacttttgcctctatgt

SEQ ID NO: 17136 - DNA, 26 bp, Homo sapiens
ttcttggtgacttttgcctctatgtc

SEQ ID NO: 17137 - DNA, 26 bp, Homo sapiens
tcttggtgacttttgcctctatgtcg

SEQ ID NO: 17138 - DNA, 26 bp, Homo sapiens
cttggtgacttttgcctctatgtcgt

SEQ ID NO: 17139 - DNA, 26 bp, Homo sapiens
ttggtgacttttgcctctatgtcgta

SEQ ID NO: 17140 - DNA, 26 bp, Homo sapiens
tggtgacttttgcctctatgtcgtat

SEQ ID NO: 17141 - DNA, 26 bp, Homo sapiens
ggtgacttttgcctctatgtcgtatc

SEQ ID NO: 17142 - DNA, 26 bp, Homo sapiens
gtgacttttgcctctatgtcgtatct

SEQ ID NO: 17143 - DNA, 26 bp, Homo sapiens
tgacttttgcctctatgtcgtatctc

SEQ ID NO: 17144 - DNA, 26 bp, Homo sapiens
gacttttgcctctatgtcgtatctct

SEQ ID NO: 17145 - DNA, 26 bp, Homo sapiens
acttttgcctctatgtcgtatctctc

SEQ ID NO: 17146 - DNA, 26 bp, Homo sapiens
cttttgcctctatgtcgtatctctct

SEQ ID NO: 17147 - DNA, 26 bp, Homo sapiens
ttttgcctctatgtcgtatctctctt

SEQ ID NO: 17148 - DNA, 26 bp, Homo sapiens
tttgcctctatgtcgtatctctcttc

SEQ ID NO: 17149 - DNA, 26 bp, Homo sapiens
ttgcctctatgtcgtatctctcttca

SEQ ID NO: 17150 - DNA, 26 bp, Homo sapiens
tgcctctatgtcgtatctctcttcat

SEQ ID NO: 17151 - DNA, 26 bp, Homo sapiens
gcctctatgtcgtatctctcttcatc

SEQ ID NO: 17152 - DNA, 26 bp, Homo sapiens
cctctatgtcgtatctctcttcatcc

SEQ ID NO: 17153 - DNA, 26 bp, Homo sapiens
ctctatgtcgtatctctcttcatcca

SEQ ID NO: 17154 - DNA, 26 bp, Homo sapiens
tctatgtcgtatctctcttcatccac

SEQ ID NO: 17155 - DNA, 26 bp, Homo sapiens
ctatgtcgtatctctcttcatccacc

SEQ ID NO: 17156 - DNA, 26 bp, Homo sapiens
tatgtcgtatctctcttcatccacct

SEQ ID NO: 17157 - DNA, 26 bp, Homo sapiens
atgtcgtatctctcttcatccacctt

SEQ ID NO: 17158 - DNA, 26 bp, Homo sapiens
tgtcgtatctctcttcatccaccttg

SEQ ID NO: 17159 - DNA, 26 bp, Homo sapiens
gtcgtatctctcttcatccaccttgt

SEQ ID NO: 17160 - DNA, 26 bp, Homo sapiens
tcgtatctctcttcatccaccttgtc

SEQ ID NO: 17161 - DNA, 26 bp, Homo sapiens
cgtatctctcttcatccaccttgtcc

SEQ ID NO: 17162 - DNA, 26 bp, Homo sapiens
gtatctctcttcatccaccttgtcca

SEQ ID NO: 17163 - DNA, 26 bp, Homo sapiens
tatctctcttcatccaccttgtccac

SEQ ID NO: 17164 - DNA, 26 bp, Homo sapiens
atctctcttcatccaccttgtccaca

SEQ ID NO: 17165 - DNA, 26 bp, Homo sapiens
tctctcttcatccaccttgtccacac

SEQ ID NO: 17166 - DNA, 26 bp, Homo sapiens
ctctcttcatccaccttgtccacacg

SEQ ID NO: 17167 - DNA, 26 bp, Homo sapiens
tctcttcatccaccttgtccacacgg

SEQ ID NO: 17168 - DNA, 26 bp, Homo sapiens
ctcttcatccaccttgtccacacggg

SEQ ID NO: 17169 - DNA, 26 bp, Homo sapiens
tcttcatccaccttgtccacacgggc

SEQ ID NO: 17170 - DNA, 26 bp, Homo sapiens
cttcatccaccttgtccacacgggcg

SEQ ID NO: 17171 - DNA, 26 bp, Homo sapiens
ttcatccaccttgtccacacgggcgt

SEQ ID NO: 17172 - DNA, 26 bp, Homo sapiens
tcatccaccttgtccacacgggcgtg

SEQ ID NO: 17173 - DNA, 26 bp, Homo sapiens
catccaccttgtccacacgggcgtgg

SEQ ID NO: 17174 - DNA, 26 bp, Homo sapiens
atccaccttgtccacacgggcgtgga

SEQ ID NO: 17175 - DNA, 26 bp, Homo sapiens
tccaccttgtccacacgggcgtggag

SEQ ID NO: 17176 - DNA, 26 bp, Homo sapiens
ccaccttgtccacacgggcgtggagc

SEQ ID NO: 17177 - DNA, 26 bp, Homo sapiens
caccttgtccacacgggcgtggagct

SEQ ID NO: 17178 - DNA, 26 bp, Homo sapiens
accttgtccacacgggcgtggagctg

SEQ ID NO: 17179 - DNA, 26 bp, Homo sapiens
ccttgtccacacgggcgtggagctgt

SEQ ID NO: 17180 - DNA, 26 bp, Homo sapiens
cttgtccacacgggcgtggagctgtc

SEQ ID NO: 17181 - DNA, 26 bp, Homo sapiens
ttgtccacacgggcgtggagctgtcg

SEQ ID NO: 17182 - DNA, 26 bp, Homo sapiens
tgtccacacgggcgtggagctgtcgg

SEQ ID NO: 17183 - DNA, 26 bp, Homo sapiens
gtccacacgggcgtggagctgtcggc

SEQ ID NO: 17184 - DNA, 26 bp, Homo sapiens
tccacacgggcgtggagctgtcggca

SEQ ID NO: 17185 - DNA, 26 bp, Homo sapiens
ccacacgggcgtggagctgtcggcac

SEQ ID NO: 17186 - DNA, 26 bp, Homo sapiens
cacacgggcgtggagctgtcggcaca

SEQ ID NO: 17187 - DNA, 26 bp, Homo sapiens
acacgggcgtggagctgtcggcacaa

SEQ ID NO: 17188 - DNA, 26 bp, Homo sapiens
cacgggcgtggagctgtcggcacaag

SEQ ID NO: 17189 - DNA, 26 bp, Homo sapiens
acgggcgtggagctgtcggcacaagt

SEQ ID NO: 17190 - DNA, 26 bp, Homo sapiens
cgggcgtggagctgtcggcacaagtc

SEQ ID NO: 17191 - DNA, 26 bp, Homo sapiens
gggcgtggagctgtcggcacaagtcc

SEQ ID NO: 17192 - DNA, 26 bp, Homo sapiens
ggcgtggagctgtcggcacaagtcct

SEQ ID NO: 17193 - DNA, 26 bp, Homo sapiens
gcgtggagctgtcggcacaagtcctg

SEQ ID NO: 17194 - DNA, 26 bp, Homo sapiens
cgtggagctgtcggcacaagtcctgc

SEQ ID NO: 17195 - DNA, 26 bp, Homo sapiens
gtggagctgtcggcacaagtcctgca

SEQ ID NO: 17196 - DNA, 26 bp, Homo sapiens
tggagctgtcggcacaagtcctgcag

SEQ ID NO: 17197 - DNA, 26 bp, Homo sapiens
ggagctgtcggcacaagtcctgcagc

SEQ ID NO: 17198 - DNA, 26 bp, Homo sapiens
gagctgtcggcacaagtcctgcagct

SEQ ID NO: 17199 - DNA, 26 bp, Homo sapiens
agctgtcggcacaagtcctgcagctc

SEQ ID NO: 17200 - DNA, 26 bp, Homo sapiens
gctgtcggcacaagtcctgcagctcc

SEQ ID NO: 17201 - DNA, 26 bp, Homo sapiens
ctgtcggcacaagtcctgcagctccg

SEQ ID NO: 17202 - DNA, 26 bp, Homo sapiens
tgtcggcacaagtcctgcagctccgc

SEQ ID NO: 17203 - DNA, 26 bp, Homo sapiens
gtcggcacaagtcctgcagctccgcg

SEQ ID NO: 17204 - DNA, 26 bp, Homo sapiens
tcggcacaagtcctgcagctccgcga

SEQ ID NO: 17205 - DNA, 26 bp, Homo sapiens
cggcacaagtcctgcagctccgcgaa

SEQ ID NO: 17206 - DNA, 26 bp, Homo sapiens
ggcacaagtcctgcagctccgcgaag

SEQ ID NO: 17207 - DNA, 26 bp, Homo sapiens
gcacaagtcctgcagctccgcgaagc

SEQ ID NO: 17208 - DNA, 26 bp, Homo sapiens
cacaagtcctgcagctccgcgaagcc

SEQ ID NO: 17209 - DNA, 26 bp, Homo sapiens
acaagtcctgcagctccgcgaagccc

SEQ ID NO: 17210 - DNA, 26 bp, Homo sapiens
caagtcctgcagctccgcgaagccca

SEQ ID NO: 17211 - DNA, 26 bp, Homo sapiens
aagtcctgcagctccgcgaagcccag

SEQ ID NO: 17212 - DNA, 26 bp, Homo sapiens
agtcctgcagctccgcgaagcccagc

SEQ ID NO: 17213 - DNA, 26 bp, Homo sapiens
gtcctgcagctccgcgaagcccagcc

SEQ ID NO: 17214 - DNA, 26 bp, Homo sapiens
tcctgcagctccgcgaagcccagccc

SEQ ID NO: 17215 - DNA, 26 bp, Homo sapiens
cctgcagctccgcgaagcccagcccg

SEQ ID NO: 17216 - DNA, 26 bp, Homo sapiens
ctgcagctccgcgaagcccagcccgg

SEQ ID NO: 17217 - DNA, 26 bp, Homo sapiens
tgcagctccgcgaagcccagcccggc

SEQ ID NO: 17218 - DNA, 26 bp, Homo sapiens
gcagctccgcgaagcccagcccggcc

SEQ ID NO: 17219 - DNA, 26 bp, Homo sapiens
cagctccgcgaagcccagcccggcca

SEQ ID NO: 17220 - DNA, 26 bp, Homo sapiens
agctccgcgaagcccagcccggccaa

SEQ ID NO: 17221 - DNA, 26 bp, Homo sapiens
gctccgcgaagcccagcccggccaac

SEQ ID NO: 17222 - DNA, 26 bp, Homo sapiens
ctccgcgaagcccagcccggccaact

SEQ ID NO: 17223 - DNA, 26 bp, Homo sapiens
tccgcgaagcccagcccggccaactc

SEQ ID NO: 17224 - DNA, 26 bp, Homo sapiens
ccgcgaagcccagcccggccaactcc

SEQ ID NO: 17225 - DNA, 26 bp, Homo sapiens
cgcgaagcccagcccggccaactcca

SEQ ID NO: 17226 - DNA, 26 bp, Homo sapiens
gcgaagcccagcccggccaactccag

SEQ ID NO: 17227 - DNA, 26 bp, Homo sapiens
cgaagcccagcccggccaactccagc

SEQ ID NO: 17228 - DNA, 26 bp, Homo sapiens
gaagcccagcccggccaactccagcg

SEQ ID NO: 17229 - DNA, 26 bp, Homo sapiens
aagcccagcccggccaactccagcgg

SEQ ID NO: 17230 - DNA, 26 bp, Homo sapiens
agcccagcccggccaactccagcggc

SEQ ID NO: 17231 - DNA, 26 bp, Homo sapiens
gcccagcccggccaactccagcggct

SEQ ID NO: 17232 - DNA, 26 bp, Homo sapiens
cccagcccggccaactccagcggctg

SEQ ID NO: 17233 - DNA, 26 bp, Homo sapiens
ccagcccggccaactccagcggctgg

SEQ ID NO: 17234 - DNA, 26 bp, Homo sapiens
cagcccggccaactccagcggctggc

SEQ ID NO: 17235 - DNA, 26 bp, Homo sapiens
agcccggccaactccagcggctggca

SEQ ID NO: 17236 - DNA, 26 bp, Homo sapiens
gcccggccaactccagcggctggcag

SEQ ID NO: 17237 - DNA, 26 bp, Homo sapiens
cccggccaactccagcggctggcagc

SEQ ID NO: 17238 - DNA, 26 bp, Homo sapiens
ccggccaactccagcggctggcagcg

SEQ ID NO: 17239 - DNA, 26 bp, Homo sapiens
cggccaactccagcggctggcagcgg

SEQ ID NO: 17240 - DNA, 26 bp, Homo sapiens
ggccaactccagcggctggcagcggg

SEQ ID NO: 17241 - DNA, 26 bp, Homo sapiens
gccaactccagcggctggcagcgggt

SEQ ID NO: 17242 - DNA, 26 bp, Homo sapiens
ccaactccagcggctggcagcgggtg

SEQ ID NO: 17243 - DNA, 26 bp, Homo sapiens
caactccagcggctggcagcgggtgc

SEQ ID NO: 17244 - DNA, 26 bp, Homo sapiens
aactccagcggctggcagcgggtgct

SEQ ID NO: 17245 - DNA, 26 bp, Homo sapiens
actccagcggctggcagcgggtgctc

SEQ ID NO: 17246 - DNA, 26 bp, Homo sapiens
ctccagcggctggcagcgggtgctca

SEQ ID NO: 17247 - DNA, 26 bp, Homo sapiens
tccagcggctggcagcgggtgctcag

SEQ ID NO: 17248 - DNA, 26 bp, Homo sapiens
ccagcggctggcagcgggtgctcaga

SEQ ID NO: 17249 - DNA, 26 bp, Homo sapiens
cagcggctggcagcgggtgctcagag

SEQ ID NO: 17250 - DNA, 26 bp, Homo sapiens
agcggctggcagcgggtgctcagagc

SEQ ID NO: 17251 - DNA, 26 bp, Homo sapiens
gcggctggcagcgggtgctcagagcg

SEQ ID NO: 17252 - DNA, 26 bp, Homo sapiens
cggctggcagcgggtgctcagagcgc

SEQ ID NO: 17253 - DNA, 26 bp, Homo sapiens
ggctggcagcgggtgctcagagcgcg

SEQ ID NO: 17254 - DNA, 26 bp, Homo sapiens
gctggcagcgggtgctcagagcgcgc

SEQ ID NO: 17255 - DNA, 26 bp, Homo sapiens
ctggcagcgggtgctcagagcgcgcc

SEQ ID NO: 17256 - DNA, 26 bp, Homo sapiens
tggcagcgggtgctcagagcgcgccc

SEQ ID NO: 17257 - DNA, 26 bp, Homo sapiens
ggcagcgggtgctcagagcgcgcccc

SEQ ID NO: 17258 - DNA, 26 bp, Homo sapiens
gcagcgggtgctcagagcgcgcccct

SEQ ID NO: 17259 - DNA, 26 bp, Homo sapiens
cagcgggtgctcagagcgcgcccctt

SEQ ID NO: 17260 - DNA, 26 bp, Homo sapiens
agcgggtgctcagagcgcgccccttc

SEQ ID NO: 17261 - DNA, 26 bp, Homo sapiens
gcgggtgctcagagcgcgccccttct

SEQ ID NO: 17262 - DNA, 26 bp, Homo sapiens
cgggtgctcagagcgcgccccttctc

SEQ ID NO: 17263 - DNA, 26 bp, Homo sapiens
gggtgctcagagcgcgccccttctct

SEQ ID NO: 17264 - DNA, 26 bp, Homo sapiens
ggtgctcagagcgcgccccttctctc

SEQ ID NO: 17265 - DNA, 26 bp, Homo sapiens
gtgctcagagcgcgccccttctctcc

SEQ ID NO: 17266 - DNA, 26 bp, Homo sapiens
tgctcagagcgcgccccttctctccg

SEQ ID NO: 17267 - DNA, 26 bp, Homo sapiens
gctcagagcgcgccccttctctccgc

SEQ ID NO: 17268 - DNA, 26 bp, Homo sapiens
ctcagagcgcgccccttctctccgcg

SEQ ID NO: 17269 - DNA, 26 bp, Homo sapiens
tcagagcgcgccccttctctccgcgc

SEQ ID NO: 17270 - DNA, 26 bp, Homo sapiens
cagagcgcgccccttctctccgcgcc

SEQ ID NO: 17271 - DNA, 26 bp, Homo sapiens
agagcgcgccccttctctccgcgccg

SEQ ID NO: 17272 - DNA, 26 bp, Homo sapiens
gagcgcgccccttctctccgcgccgc

SEQ ID NO: 17273 - DNA, 26 bp, Homo sapiens
agcgcgccccttctctccgcgccgct

SEQ ID NO: 17274 - DNA, 26 bp, Homo sapiens
gcgcgccccttctctccgcgccgctc

SEQ ID NO: 17275 - DNA, 26 bp, Homo sapiens
cgcgccccttctctccgcgccgctcc

SEQ ID NO: 17276 - DNA, 26 bp, Homo sapiens
gcgccccttctctccgcgccgctcct

SEQ ID NO: 17277 - DNA, 26 bp, Homo sapiens
cgccccttctctccgcgccgctcctc

SEQ ID NO: 17278 - DNA, 26 bp, Homo sapiens
gccccttctctccgcgccgctcctcc

SEQ ID NO: 17279 - DNA, 26 bp, Homo sapiens
ccccttctctccgcgccgctcctccg

SEQ ID NO: 17280 - DNA, 26 bp, Homo sapiens
cccttctctccgcgccgctcctccgc

SEQ ID NO: 17281 - DNA, 26 bp, Homo sapiens
ccttctctccgcgccgctcctccgcc

SEQ ID NO: 17282 - DNA, 26 bp, Homo sapiens
cttctctccgcgccgctcctccgcct

SEQ ID NO: 17283 - DNA, 26 bp, Homo sapiens
ttctctccgcgccgctcctccgcctc

SEQ ID NO: 17284 - DNA, 26 bp, Homo sapiens
tctctccgcgccgctcctccgcctct

SEQ ID NO: 17285 - DNA, 26 bp, Homo sapiens
ctctccgcgccgctcctccgcctctc

SEQ ID NO: 17286 - DNA, 26 bp, Homo sapiens
tctccgcgccgctcctccgcctctcg

SEQ ID NO: 17287 - DNA, 26 bp, Homo sapiens
ctccgcgccgctcctccgcctctcgc

SEQ ID NO: 17288 - DNA, 26 bp, Homo sapiens
tccgcgccgctcctccgcctctcgct

SEQ ID NO: 17289 - DNA, 26 bp, Homo sapiens
ccgcgccgctcctccgcctctcgctc

SEQ ID NO: 17290 - DNA, 26 bp, Homo sapiens
cgcgccgctcctccgcctctcgctcc

SEQ ID NO: 17291 - DNA, 26 bp, Homo sapiens
gcgccgctcctccgcctctcgctcca

SEQ ID NO: 17292 - DNA, 26 bp, Homo sapiens
cgccgctcctccgcctctcgctccag

SEQ ID NO: 17293 - DNA, 26 bp, Homo sapiens
gccgctcctccgcctctcgctccagc

SEQ ID NO: 17294 - DNA, 26 bp, Homo sapiens
ccgctcctccgcctctcgctccagct

SEQ ID NO: 17295 - DNA, 26 bp, Homo sapiens
cgctcctccgcctctcgctccagctc

SEQ ID NO: 17296 - DNA, 26 bp, Homo sapiens
gctcctccgcctctcgctccagctct

SEQ ID NO: 17297 - DNA, 26 bp, Homo sapiens
ctcctccgcctctcgctccagctctt

SEQ ID NO: 17298 - DNA, 26 bp, Homo sapiens
tcctccgcctctcgctccagctcttg

SEQ ID NO: 17299 - DNA, 26 bp, Homo sapiens
cctccgcctctcgctccagctcttgc

SEQ ID NO: 17300 - DNA, 26 bp, Homo sapiens
ctccgcctctcgctccagctcttgct

SEQ ID NO: 17301 - DNA, 26 bp, Homo sapiens
tccgcctctcgctccagctcttgctt

SEQ ID NO: 17302 - DNA, 26 bp, Homo sapiens
ccgcctctcgctccagctcttgcttt

SEQ ID NO: 17303 - DNA, 26 bp, Homo sapiens
cgcctctcgctccagctcttgctttg

SEQ ID NO: 17304 - DNA, 26 bp, Homo sapiens
gcctctcgctccagctcttgctttgc

SEQ ID NO: 17305 - DNA, 26 bp, Homo sapiens
cctctcgctccagctcttgctttgca

SEQ ID NO: 17306 - DNA, 26 bp, Homo sapiens
ctctcgctccagctcttgctttgcaa

SEQ ID NO: 17307 - DNA, 26 bp, Homo sapiens
tctcgctccagctcttgctttgcaat

SEQ ID NO: 17308 - DNA, 26 bp, Homo sapiens
ctcgctccagctcttgctttgcaatc

SEQ ID NO: 17309 - DNA, 26 bp, Homo sapiens
tcgctccagctcttgctttgcaatct

SEQ ID NO: 17310 - DNA, 26 bp, Homo sapiens
cgctccagctcttgctttgcaatctg

SEQ ID NO: 17311 - DNA, 26 bp, Homo sapiens
gctccagctcttgctttgcaatctgc

SEQ ID NO: 17312 - DNA, 26 bp, Homo sapiens
ctccagctcttgctttgcaatctgca

SEQ ID NO: 17313 - DNA, 26 bp, Homo sapiens
tccagctcttgctttgcaatctgcag

SEQ ID NO: 17314 - DNA, 26 bp, Homo sapiens
ccagctcttgctttgcaatctgcagc

SEQ ID NO: 17315 - DNA, 26 bp, Homo sapiens
cagctcttgctttgcaatctgcagca

SEQ ID NO: 17316 - DNA, 26 bp, Homo sapiens
agctcttgctttgcaatctgcagcag

SEQ ID NO: 17317 - DNA, 26 bp, Homo sapiens
gctcttgctttgcaatctgcagcagc

SEQ ID NO: 17318 - DNA, 26 bp, Homo sapiens
ctcttgctttgcaatctgcagcagca

SEQ ID NO: 17319 - DNA, 26 bp, Homo sapiens
tcttgctttgcaatctgcagcagcag

SEQ ID NO: 17320 - DNA, 26 bp, Homo sapiens
cttgctttgcaatctgcagcagcaga

SEQ ID NO: 17321 - DNA, 26 bp, Homo sapiens
ttgctttgcaatctgcagcagcagag

SEQ ID NO: 17322 - DNA, 26 bp, Homo sapiens
tgctttgcaatctgcagcagcagagt

SEQ ID NO: 17323 - DNA, 26 bp, Homo sapiens
gctttgcaatctgcagcagcagagtc

SEQ ID NO: 17324 - DNA, 26 bp, Homo sapiens
ctttgcaatctgcagcagcagagtct

SEQ ID NO: 17325 - DNA, 26 bp, Homo sapiens
tttgcaatctgcagcagcagagtctt

SEQ ID NO: 17326 - DNA, 26 bp, Homo sapiens
ttgcaatctgcagcagcagagtcttc

SEQ ID NO: 17327 - DNA, 26 bp, Homo sapiens
tgcaatctgcagcagcagagtcttca

SEQ ID NO: 17328 - DNA, 26 bp, Homo sapiens
gcaatctgcagcagcagagtcttcag

SEQ ID NO: 17329 - DNA, 26 bp, Homo sapiens
caatctgcagcagcagagtcttcagc

SEQ ID NO: 17330 - DNA, 26 bp, Homo sapiens
aatctgcagcagcagagtcttcagct

SEQ ID NO: 17331 - DNA, 26 bp, Homo sapiens
atctgcagcagcagagtcttcagctg

SEQ ID NO: 17332 - DNA, 26 bp, Homo sapiens
tctgcagcagcagagtcttcagctgc

SEQ ID NO: 17333 - DNA, 26 bp, Homo sapiens
ctgcagcagcagagtcttcagctgca

SEQ ID NO: 17334 - DNA, 26 bp, Homo sapiens
tgcagcagcagagtcttcagctgcaa

SEQ ID NO: 17335 - DNA, 26 bp, Homo sapiens
gcagcagcagagtcttcagctgcaat

SEQ ID NO: 17336 - DNA, 26 bp, Homo sapiens
cagcagcagagtcttcagctgcaatt

SEQ ID NO: 17337 - DNA, 26 bp, Homo sapiens
agcagcagagtcttcagctgcaattt

SEQ ID NO: 17338 - DNA, 26 bp, Homo sapiens
gcagcagagtcttcagctgcaatttt

SEQ ID NO: 17339 - DNA, 26 bp, Homo sapiens
cagcagagtcttcagctgcaattttc

SEQ ID NO: 17340 - DNA, 26 bp, Homo sapiens
agcagagtcttcagctgcaattttct

SEQ ID NO: 17341 - DNA, 26 bp, Homo sapiens
gcagagtcttcagctgcaattttctc

SEQ ID NO: 17342 - DNA, 26 bp, Homo sapiens
cagagtcttcagctgcaattttctcg

SEQ ID NO: 17343 - DNA, 26 bp, Homo sapiens
agagtcttcagctgcaattttctcga

SEQ ID NO: 17344 - DNA, 26 bp, Homo sapiens
gagtcttcagctgcaattttctcgag

SEQ ID NO: 17345 - DNA, 26 bp, Homo sapiens
agtcttcagctgcaattttctcgagg

SEQ ID NO: 17346 - DNA, 26 bp, Homo sapiens
gtcttcagctgcaattttctcgaggc

SEQ ID NO: 17347 - DNA, 26 bp, Homo sapiens
tcttcagctgcaattttctcgaggcg

SEQ ID NO: 17348 - DNA, 26 bp, Homo sapiens
cttcagctgcaattttctcgaggcgg

SEQ ID NO: 17349 - DNA, 26 bp, Homo sapiens
ttcagctgcaattttctcgaggcgga

SEQ ID NO: 17350 - DNA, 26 bp, Homo sapiens
tcagctgcaattttctcgaggcggag

SEQ ID NO: 17351 - DNA, 26 bp, Homo sapiens
cagctgcaattttctcgaggcggaga

SEQ ID NO: 17352 - DNA, 26 bp, Homo sapiens
agctgcaattttctcgaggcggagat

SEQ ID NO: 17353 - DNA, 26 bp, Homo sapiens
gctgcaattttctcgaggcggagatc

SEQ ID NO: 17354 - DNA, 26 bp, Homo sapiens
ctgcaattttctcgaggcggagatct

SEQ ID NO: 17355 - DNA, 26 bp, Homo sapiens
tgcaattttctcgaggcggagatctt

SEQ ID NO: 17356 - DNA, 26 bp, Homo sapiens
gcaattttctcgaggcggagatctta

SEQ ID NO: 17357 - DNA, 26 bp, Homo sapiens
caattttctcgaggcggagatcttag

SEQ ID NO: 17358 - DNA, 26 bp, Homo sapiens
aattttctcgaggcggagatcttaga

SEQ ID NO: 17359 - DNA, 26 bp, Homo sapiens
attttctcgaggcggagatcttagat

SEQ ID NO: 17360 - DNA, 26 bp, Homo sapiens
ttttctcgaggcggagatcttagatt

SEQ ID NO: 17361 - DNA, 26 bp, Homo sapiens
tttctcgaggcggagatcttagattt

SEQ ID NO: 17362 - DNA, 26 bp, Homo sapiens
ttctcgaggcggagatcttagatttt

SEQ ID NO: 17363 - DNA, 26 bp, Homo sapiens
tctcgaggcggagatcttagattttt

SEQ ID NO: 17364 - DNA, 26 bp, Homo sapiens
ctcgaggcggagatcttagatttttt

SEQ ID NO: 17365 - DNA, 26 bp, Homo sapiens
tcgaggcggagatcttagattttttc

SEQ ID NO: 17366 - DNA, 26 bp, Homo sapiens
cgaggcggagatcttagattttttct

SEQ ID NO: 17367 - DNA, 26 bp, Homo sapiens
gaggcggagatcttagattttttctt

SEQ ID NO: 17368 - DNA, 26 bp, Homo sapiens
aggcggagatcttagattttttcttg

SEQ ID NO: 17369 - DNA, 26 bp, Homo sapiens
ggcggagatcttagattttttcttgg

SEQ ID NO: 17370 - DNA, 26 bp, Homo sapiens
gcggagatcttagattttttcttggc

SEQ ID NO: 17371 - DNA, 26 bp, Homo sapiens
cggagatcttagattttttcttggcg

SEQ ID NO: 17372 - DNA, 26 bp, Homo sapiens
ggagatcttagattttttcttggcgt

SEQ ID NO: 17373 - DNA, 26 bp, Homo sapiens
gagatcttagattttttcttggcgtg

SEQ ID NO: 17374 - DNA, 26 bp, Homo sapiens
agatcttagattttttcttggcgtgc

SEQ ID NO: 17375 - DNA, 26 bp, Homo sapiens
gatcttagattttttcttggcgtgcg

SEQ ID NO: 17376 - DNA, 26 bp, Homo sapiens
atcttagattttttcttggcgtgcgg

SEQ ID NO: 17377 - DNA, 26 bp, Homo sapiens
tcttagattttttcttggcgtgcggc

SEQ ID NO: 17378 - DNA, 26 bp, Homo sapiens
cttagattttttcttggcgtgcggct

SEQ ID NO: 17379 - DNA, 26 bp, Homo sapiens
ttagattttttcttggcgtgcggctc

SEQ ID NO: 17380 - DNA, 26 bp, Homo sapiens
tagattttttcttggcgtgcggctcc

SEQ ID NO: 17381 - DNA, 26 bp, Homo sapiens
agattttttcttggcgtgcggctccg

SEQ ID NO: 17382 - DNA, 26 bp, Homo sapiens
gattttttcttggcgtgcggctccgt

SEQ ID NO: 17383 - DNA, 26 bp, Homo sapiens
attttttcttggcgtgcggctccgtg

SEQ ID NO: 17384 - DNA, 26 bp, Homo sapiens
ttttttcttggcgtgcggctccgtgg

SEQ ID NO: 17385 - DNA, 26 bp, Homo sapiens
tttttcttggcgtgcggctccgtggc

SEQ ID NO: 17386 - DNA, 26 bp, Homo sapiens
ttttcttggcgtgcggctccgtggca

SEQ ID NO: 17387 - DNA, 26 bp, Homo sapiens
tttcttggcgtgcggctccgtggcat

SEQ ID NO: 17388 - DNA, 26 bp, Homo sapiens
ttcttggcgtgcggctccgtggcata

SEQ ID NO: 17389 - DNA, 26 bp, Homo sapiens
tcttggcgtgcggctccgtggcataa

SEQ ID NO: 17390 - DNA, 26 bp, Homo sapiens
cttggcgtgcggctccgtggcataag

SEQ ID NO: 17391 - DNA, 26 bp, Homo sapiens
ttggcgtgcggctccgtggcataagc

SEQ ID NO: 17392 - DNA, 26 bp, Homo sapiens
tggcgtgcggctccgtggcataagcg

SEQ ID NO: 17393 - DNA, 26 bp, Homo sapiens
ggcgtgcggctccgtggcataagcgc

SEQ ID NO: 17394 - DNA, 26 bp, Homo sapiens
gcgtgcggctccgtggcataagcgcg

SEQ ID NO: 17395 - DNA, 26 bp, Homo sapiens
cgtgcggctccgtggcataagcgcgg

SEQ ID NO: 17396 - DNA, 26 bp, Homo sapiens
gtgcggctccgtggcataagcgcggt

SEQ ID NO: 17397 - DNA, 26 bp, Homo sapiens
tgcggctccgtggcataagcgcggta

SEQ ID NO: 17398 - DNA, 26 bp, Homo sapiens
gcggctccgtggcataagcgcggtag

SEQ ID NO: 17399 - DNA, 26 bp, Homo sapiens
cggctccgtggcataagcgcggtagt

SEQ ID NO: 17400 - DNA, 26 bp, Homo sapiens
ggctccgtggcataagcgcggtagtt

SEQ ID NO: 17401 - DNA, 26 bp, Homo sapiens
gctccgtggcataagcgcggtagttg

SEQ ID NO: 17402 - DNA, 26 bp, Homo sapiens
ctccgtggcataagcgcggtagttgg

SEQ ID NO: 17403 - DNA, 26 bp, Homo sapiens
tccgtggcataagcgcggtagttgga

SEQ ID NO: 17404 - DNA, 26 bp, Homo sapiens
ccgtggcataagcgcggtagttggag

SEQ ID NO: 17405 - DNA, 26 bp, Homo sapiens
cgtggcataagcgcggtagttggagg

SEQ ID NO: 17406 - DNA, 26 bp, Homo sapiens
gtggcataagcgcggtagttggagga

SEQ ID NO: 17407 - DNA, 26 bp, Homo sapiens
tggcataagcgcggtagttggaggag

SEQ ID NO: 17408 - DNA, 26 bp, Homo sapiens
ggcataagcgcggtagttggaggagc

SEQ ID NO: 17409 - DNA, 26 bp, Homo sapiens
gcataagcgcggtagttggaggagcg

SEQ ID NO: 17410 - DNA, 26 bp, Homo sapiens
cataagcgcggtagttggaggagcgg

SEQ ID NO: 17411 - DNA, 26 bp, Homo sapiens
ataagcgcggtagttggaggagcggc

SEQ ID NO: 17412 - DNA, 26 bp, Homo sapiens
taagcgcggtagttggaggagcggcg

SEQ ID NO: 17413 - DNA, 26 bp, Homo sapiens
aagcgcggtagttggaggagcggcgt

SEQ ID NO: 17414 - DNA, 26 bp, Homo sapiens
agcgcggtagttggaggagcggcgtc

SEQ ID NO: 17415 - DNA, 26 bp, Homo sapiens
gcgcggtagttggaggagcggcgtct

SEQ ID NO: 17416 - DNA, 26 bp, Homo sapiens
cgcggtagttggaggagcggcgtctg

SEQ ID NO: 17417 - DNA, 26 bp, Homo sapiens
gcggtagttggaggagcggcgtctga

SEQ ID NO: 17418 - DNA, 26 bp, Homo sapiens
cggtagttggaggagcggcgtctgat

SEQ ID NO: 17419 - DNA, 26 bp, Homo sapiens
ggtagttggaggagcggcgtctgatt

SEQ ID NO: 17420 - DNA, 26 bp, Homo sapiens
gtagttggaggagcggcgtctgattg

SEQ ID NO: 17421 - DNA, 26 bp, Homo sapiens
tagttggaggagcggcgtctgattgg

SEQ ID NO: 17422 - DNA, 26 bp, Homo sapiens
agttggaggagcggcgtctgattggg

SEQ ID NO: 17423 - DNA, 26 bp, Homo sapiens
gttggaggagcggcgtctgattgggg

SEQ ID NO: 17424 - DNA, 26 bp, Homo sapiens
ttggaggagcggcgtctgattggggc

SEQ ID NO: 17425 - DNA, 26 bp, Homo sapiens
tggaggagcggcgtctgattggggct

SEQ ID NO: 17426 - DNA, 26 bp, Homo sapiens
ggaggagcggcgtctgattggggctg

SEQ ID NO: 17427 - DNA, 26 bp, Homo sapiens
gaggagcggcgtctgattggggctgg

SEQ ID NO: 17428 - DNA, 26 bp, Homo sapiens
aggagcggcgtctgattggggctggt

SEQ ID NO: 17429 - DNA, 26 bp, Homo sapiens
ggagcggcgtctgattggggctggtg

SEQ ID NO: 17430 - DNA, 26 bp, Homo sapiens
gagcggcgtctgattggggctggtgc

SEQ ID NO: 17431 - DNA, 26 bp, Homo sapiens
agcggcgtctgattggggctggtgca

SEQ ID NO: 17432 - DNA, 26 bp, Homo sapiens
gcggcgtctgattggggctggtgcag

SEQ ID NO: 17433 - DNA, 26 bp, Homo sapiens
cggcgtctgattggggctggtgcagg

SEQ ID NO: 17434 - DNA, 26 bp, Homo sapiens
ggcgtctgattggggctggtgcaggg

SEQ ID NO: 17435 - DNA, 26 bp, Homo sapiens
gcgtctgattggggctggtgcagggc

SEQ ID NO: 17436 - DNA, 26 bp, Homo sapiens
cgtctgattggggctggtgcagggcg

SEQ ID NO: 17437 - DNA, 26 bp, Homo sapiens
gtctgattggggctggtgcagggcga

SEQ ID NO: 17438 - DNA, 26 bp, Homo sapiens
tctgattggggctggtgcagggcgag

SEQ ID NO: 17439 - DNA, 26 bp, Homo sapiens
ctgattggggctggtgcagggcgagg

SEQ ID NO: 17440 - DNA, 26 bp, Homo sapiens
tgattggggctggtgcagggcgaggt

SEQ ID NO: 17441 - DNA, 26 bp, Homo sapiens
gattggggctggtgcagggcgaggtt

SEQ ID NO: 17442 - DNA, 26 bp, Homo sapiens
attggggctggtgcagggcgaggttc

SEQ ID NO: 17443 - DNA, 26 bp, Homo sapiens
ttggggctggtgcagggcgaggttcc

SEQ ID NO: 17444 - DNA, 26 bp, Homo sapiens
tggggctggtgcagggcgaggttccc

SEQ ID NO: 17445 - DNA, 26 bp, Homo sapiens
ggggctggtgcagggcgaggttccct

SEQ ID NO: 17446 - DNA, 26 bp, Homo sapiens
gggctggtgcagggcgaggttcccta

SEQ ID NO: 17447 - DNA, 26 bp, Homo sapiens
ggctggtgcagggcgaggttccctag

SEQ ID NO: 17448 - DNA, 26 bp, Homo sapiens
gctggtgcagggcgaggttccctagc

SEQ ID NO: 17449 - DNA, 26 bp, Homo sapiens
ctggtgcagggcgaggttccctagcc

SEQ ID NO: 17450 - DNA, 26 bp, Homo sapiens
tggtgcagggcgaggttccctagccg

SEQ ID NO: 17451 - DNA, 26 bp, Homo sapiens
ggtgcagggcgaggttccctagccgc

SEQ ID NO: 17452 - DNA, 26 bp, Homo sapiens
gtgcagggcgaggttccctagccgca

SEQ ID NO: 17453 - DNA, 26 bp, Homo sapiens
tgcagggcgaggttccctagccgcat

SEQ ID NO: 17454 - DNA, 26 bp, Homo sapiens
gcagggcgaggttccctagccgcatc

SEQ ID NO: 17455 - DNA, 26 bp, Homo sapiens
cagggcgaggttccctagccgcatcg

SEQ ID NO: 17456 - DNA, 26 bp, Homo sapiens
agggcgaggttccctagccgcatcgc

SEQ ID NO: 17457 - DNA, 26 bp, Homo sapiens
gggcgaggttccctagccgcatcgct

SEQ ID NO: 17458 - DNA, 26 bp, Homo sapiens
ggcgaggttccctagccgcatcgctg

SEQ ID NO: 17459 - DNA, 26 bp, Homo sapiens
gcgaggttccctagccgcatcgctgc

SEQ ID NO: 17460 - DNA, 26 bp, Homo sapiens
cgaggttccctagccgcatcgctgct

SEQ ID NO: 17461 - DNA, 26 bp, Homo sapiens
gaggttccctagccgcatcgctgctc

SEQ ID NO: 17462 - DNA, 26 bp, Homo sapiens
aggttccctagccgcatcgctgctcc

SEQ ID NO: 17463 - DNA, 26 bp, Homo sapiens
ggttccctagccgcatcgctgctccc

SEQ ID NO: 17464 - DNA, 26 bp, Homo sapiens
gttccctagccgcatcgctgctccca

SEQ ID NO: 17465 - DNA, 26 bp, Homo sapiens
ttccctagccgcatcgctgctcccat

SEQ ID NO: 17466 - DNA, 26 bp, Homo sapiens
tccctagccgcatcgctgctcccatc

SEQ ID NO: 17467 - DNA, 26 bp, Homo sapiens
ccctagccgcatcgctgctcccatcc

SEQ ID NO: 17468 - DNA, 26 bp, Homo sapiens
cctagccgcatcgctgctcccatccg

SEQ ID NO: 17469 - DNA, 26 bp, Homo sapiens
ctagccgcatcgctgctcccatccgc

SEQ ID NO: 17470 - DNA, 26 bp, Homo sapiens
tagccgcatcgctgctcccatccgcc

SEQ ID NO: 17471 - DNA, 26 bp, Homo sapiens
agccgcatcgctgctcccatccgcca

SEQ ID NO: 17472 - DNA, 26 bp, Homo sapiens
gccgcatcgctgctcccatccgccat

SEQ ID NO: 17473 - DNA, 26 bp, Homo sapiens
ccgcatcgctgctcccatccgccatg

SEQ ID NO: 17474 - DNA, 26 bp, Homo sapiens
cgcatcgctgctcccatccgccatgc

SEQ ID NO: 17475 - DNA, 26 bp, Homo sapiens
gcatcgctgctcccatccgccatgct

SEQ ID NO: 17476 - DNA, 26 bp, Homo sapiens
catcgctgctcccatccgccatgctg

SEQ ID NO: 17477 - DNA, 26 bp, Homo sapiens
atcgctgctcccatccgccatgctga

SEQ ID NO: 17478 - DNA, 26 bp, Homo sapiens
tcgctgctcccatccgccatgctgag

SEQ ID NO: 17479 - DNA, 26 bp, Homo sapiens
cgctgctcccatccgccatgctgaga

SEQ ID NO: 17480 - DNA, 26 bp, Homo sapiens
gctgctcccatccgccatgctgagac

SEQ ID NO: 17481 - DNA, 26 bp, Homo sapiens
ctgctcccatccgccatgctgagact

SEQ ID NO: 17482 - DNA, 26 bp, Homo sapiens
tgctcccatccgccatgctgagactc

SEQ ID NO: 17483 - DNA, 26 bp, Homo sapiens
gctcccatccgccatgctgagactca

SEQ ID NO: 17484 - DNA, 26 bp, Homo sapiens
ctcccatccgccatgctgagactcag

SEQ ID NO: 17485 - DNA, 26 bp, Homo sapiens
tcccatccgccatgctgagactcagg

SEQ ID NO: 17486 - DNA, 26 bp, Homo sapiens
cccatccgccatgctgagactcaggc

SEQ ID NO: 17487 - DNA, 26 bp, Homo sapiens
ccatccgccatgctgagactcaggcc

SEQ ID NO: 17488 - DNA, 26 bp, Homo sapiens
catccgccatgctgagactcaggccg

SEQ ID NO: 17489 - DNA, 26 bp, Homo sapiens
atccgccatgctgagactcaggccgg

SEQ ID NO: 17490 - DNA, 26 bp, Homo sapiens
tccgccatgctgagactcaggccggg

SEQ ID NO: 17491 - DNA, 26 bp, Homo sapiens
ccgccatgctgagactcaggccggga

SEQ ID NO: 17492 - DNA, 26 bp, Homo sapiens
cgccatgctgagactcaggccgggaa

SEQ ID NO: 17493 - DNA, 26 bp, Homo sapiens
gccatgctgagactcaggccgggaat

SEQ ID NO: 17494 - DNA, 26 bp, Homo sapiens
ccatgctgagactcaggccgggaatg

SEQ ID NO: 17495 - DNA, 26 bp, Homo sapiens
catgctgagactcaggccgggaatgg

SEQ ID NO: 17496 - DNA, 26 bp, Homo sapiens
atgctgagactcaggccgggaatggc

SEQ ID NO: 17497 - DNA, 26 bp, Homo sapiens
tgctgagactcaggccgggaatggca

SEQ ID NO: 17498 - DNA, 26 bp, Homo sapiens
gctgagactcaggccgggaatggcag

SEQ ID NO: 17499 - DNA, 26 bp, Homo sapiens
ctgagactcaggccgggaatggcagg

SEQ ID NO: 17500 - DNA, 26 bp, Homo sapiens
tgagactcaggccgggaatggcagga

SEQ ID NO: 17501 - DNA, 26 bp, Homo sapiens
gagactcaggccgggaatggcaggag

SEQ ID NO: 17502 - DNA, 26 bp, Homo sapiens
agactcaggccgggaatggcaggagg

SEQ ID NO: 17503 - DNA, 26 bp, Homo sapiens
gactcaggccgggaatggcaggaggc

SEQ ID NO: 17504 - DNA, 26 bp, Homo sapiens
actcaggccgggaatggcaggaggca

SEQ ID NO: 17505 - DNA, 26 bp, Homo sapiens
ctcaggccgggaatggcaggaggcag

SEQ ID NO: 17506 - DNA, 26 bp, Homo sapiens
tcaggccgggaatggcaggaggcagg

SEQ ID NO: 17507 - DNA, 26 bp, Homo sapiens
caggccgggaatggcaggaggcaggg

SEQ ID NO: 17508 - DNA, 26 bp, Homo sapiens
aggccgggaatggcaggaggcagggc

SEQ ID NO: 17509 - DNA, 26 bp, Homo sapiens
ggccgggaatggcaggaggcagggcg

SEQ ID NO: 17510 - DNA, 26 bp, Homo sapiens
gccgggaatggcaggaggcagggcga

SEQ ID NO: 17511 - DNA, 26 bp, Homo sapiens
ccgggaatggcaggaggcagggcgag

SEQ ID NO: 17512 - DNA, 26 bp, Homo sapiens
cgggaatggcaggaggcagggcgagg

SEQ ID NO: 17513 - DNA, 26 bp, Homo sapiens
gggaatggcaggaggcagggcgagga

SEQ ID NO: 17514 - DNA, 26 bp, Homo sapiens
ggaatggcaggaggcagggcgaggac

SEQ ID NO: 17515 - DNA, 26 bp, Homo sapiens
gaatggcaggaggcagggcgaggaca

SEQ ID NO: 17516 - DNA, 26 bp, Homo sapiens
aatggcaggaggcagggcgaggacag

SEQ ID NO: 17517 - DNA, 26 bp, Homo sapiens
atggcaggaggcagggcgaggacagg

SEQ ID NO: 17518 - DNA, 26 bp, Homo sapiens
tggcaggaggcagggcgaggacaggg

SEQ ID NO: 17519 - DNA, 26 bp, Homo sapiens
ggcaggaggcagggcgaggacagggg

SEQ ID NO: 17520 - DNA, 26 bp, Homo sapiens
gcaggaggcagggcgaggacaggggc

SEQ ID NO: 17521 - DNA, 26 bp, Homo sapiens
caggaggcagggcgaggacaggggcg

SEQ ID NO: 17522 - DNA, 26 bp, Homo sapiens
aggaggcagggcgaggacaggggcgt

SEQ ID NO: 17523 - DNA, 26 bp, Homo sapiens
ggaggcagggcgaggacaggggcgtt

SEQ ID NO: 17524 - DNA, 26 bp, Homo sapiens
gaggcagggcgaggacaggggcgttt

SEQ ID NO: 17525 - DNA, 26 bp, Homo sapiens
aggcagggcgaggacaggggcgtttg

SEQ ID NO: 17526 - DNA, 26 bp, Homo sapiens
ggcagggcgaggacaggggcgtttgg

SEQ ID NO: 17527 - DNA, 26 bp, Homo sapiens
gcagggcgaggacaggggcgtttgga

SEQ ID NO: 17528 - DNA, 26 bp, Homo sapiens
cagggcgaggacaggggcgtttggag

SEQ ID NO: 17529 - DNA, 26 bp, Homo sapiens
agggcgaggacaggggcgtttggagg

SEQ ID NO: 17530 - DNA, 26 bp, Homo sapiens
gggcgaggacaggggcgtttggaggg

SEQ ID NO: 17531 - DNA, 26 bp, Homo sapiens
ggcgaggacaggggcgtttggagggt

SEQ ID NO: 17532 - DNA, 26 bp, Homo sapiens
gcgaggacaggggcgtttggagggtc

SEQ ID NO: 17533 - DNA, 26 bp, Homo sapiens
cgaggacaggggcgtttggagggtca

SEQ ID NO: 17534 - DNA, 26 bp, Homo sapiens
gaggacaggggcgtttggagggtcag

SEQ ID NO: 17535 - DNA, 26 bp, Homo sapiens
aggacaggggcgtttggagggtcagt

SEQ ID NO: 17536 - DNA, 26 bp, Homo sapiens
ggacaggggcgtttggagggtcagtg

SEQ ID NO: 17537 - DNA, 26 bp, Homo sapiens
gacaggggcgtttggagggtcagtga

SEQ ID NO: 17538 - DNA, 26 bp, Homo sapiens
acaggggcgtttggagggtcagtgag

SEQ ID NO: 17539 - DNA, 26 bp, Homo sapiens
caggggcgtttggagggtcagtgagg

SEQ ID NO: 17540 - DNA, 26 bp, Homo sapiens
aggggcgtttggagggtcagtgaggg

SEQ ID NO: 17541 - DNA, 26 bp, Homo sapiens
ggggcgtttggagggtcagtgagggg

SEQ ID NO: 17542 - DNA, 26 bp, Homo sapiens
gggcgtttggagggtcagtgaggggg

SEQ ID NO: 17543 - DNA, 26 bp, Homo sapiens
ggcgtttggagggtcagtgagggggc

SEQ ID NO: 17544 - DNA, 26 bp, Homo sapiens
gcgtttggagggtcagtgagggggcc

SEQ ID NO: 17545 - DNA, 26 bp, Homo sapiens
cgtttggagggtcagtgagggggccg

SEQ ID NO: 17546 - DNA, 26 bp, Homo sapiens
gtttggagggtcagtgagggggccgc

SEQ ID NO: 17547 - DNA, 26 bp, Homo sapiens
tttggagggtcagtgagggggccgcc

SEQ ID NO: 17548 - DNA, 26 bp, Homo sapiens
ttggagggtcagtgagggggccgccc

SEQ ID NO: 17549 - DNA, 26 bp, Homo sapiens
tggagggtcagtgagggggccgcccg

SEQ ID NO: 17550 - DNA, 26 bp, Homo sapiens
ggagggtcagtgagggggccgcccgg

SEQ ID NO: 17551 - DNA, 26 bp, Homo sapiens
gagggtcagtgagggggccgcccggg

SEQ ID NO: 17552 - DNA, 26 bp, Homo sapiens
agggtcagtgagggggccgcccgggt

SEQ ID NO: 17553 - DNA, 26 bp, Homo sapiens
gggtcagtgagggggccgcccgggtg

SEQ ID NO: 17554 - DNA, 26 bp, Homo sapiens
ggtcagtgagggggccgcccgggtga

SEQ ID NO: 17555 - DNA, 26 bp, Homo sapiens
gtcagtgagggggccgcccgggtgac

SEQ ID NO: 17556 - DNA, 26 bp, Homo sapiens
tcagtgagggggccgcccgggtgacc

SEQ ID NO: 17557 - DNA, 26 bp, Homo sapiens
cagtgagggggccgcccgggtgacct

SEQ ID NO: 17558 - DNA, 26 bp, Homo sapiens
agtgagggggccgcccgggtgacctt

SEQ ID NO: 17559 - DNA, 26 bp, Homo sapiens
gtgagggggccgcccgggtgaccttc

SEQ ID NO: 17560 - DNA, 26 bp, Homo sapiens
tgagggggccgcccgggtgaccttca

SEQ ID NO: 17561 - DNA, 26 bp, Homo sapiens
gagggggccgcccgggtgaccttcag

SEQ ID NO: 17562 - DNA, 26 bp, Homo sapiens
agggggccgcccgggtgaccttcagg

SEQ ID NO: 17563 - DNA, 26 bp, Homo sapiens
gggggccgcccgggtgaccttcaggg

SEQ ID NO: 17564 - DNA, 26 bp, Homo sapiens
ggggccgcccgggtgaccttcagggt

SEQ ID NO: 17565 - DNA, 26 bp, Homo sapiens
gggccgcccgggtgaccttcagggtc

SEQ ID NO: 17566 - DNA, 26 bp, Homo sapiens
ggccgcccgggtgaccttcagggtcc

SEQ ID NO: 17567 - DNA, 26 bp, Homo sapiens
gccgcccgggtgaccttcagggtccc

SEQ ID NO: 17568 - DNA, 26 bp, Homo sapiens
ccgcccgggtgaccttcagggtccca

SEQ ID NO: 17569 - DNA, 26 bp, Homo sapiens
cgcccgggtgaccttcagggtcccag

SEQ ID NO: 17570 - DNA, 26 bp, Homo sapiens
gcccgggtgaccttcagggtcccagg

SEQ ID NO: 17571 - DNA, 26 bp, Homo sapiens
cccgggtgaccttcagggtcccaggg

SEQ ID NO: 17572 - DNA, 26 bp, Homo sapiens
ccgggtgaccttcagggtcccaggga

SEQ ID NO: 17573 - DNA, 26 bp, Homo sapiens
cgggtgaccttcagggtcccagggac

SEQ ID NO: 17574 - DNA, 26 bp, Homo sapiens
gggtgaccttcagggtcccagggacc

SEQ ID NO: 17575 - DNA, 26 bp, Homo sapiens
ggtgaccttcagggtcccagggaccg

SEQ ID NO: 17576 - DNA, 26 bp, Homo sapiens
gtgaccttcagggtcccagggaccgt

SEQ ID NO: 17577 - DNA, 26 bp, Homo sapiens
tgaccttcagggtcccagggaccgtc

SEQ ID NO: 17578 - DNA, 26 bp, Homo sapiens
gaccttcagggtcccagggaccgtca

SEQ ID NO: 17579 - DNA, 26 bp, Homo sapiens
accttcagggtcccagggaccgtcag

SEQ ID NO: 17580 - DNA, 26 bp, Homo sapiens
ccttcagggtcccagggaccgtcagt

SEQ ID NO: 17581 - DNA, 26 bp, Homo sapiens
cttcagggtcccagggaccgtcagtc

SEQ ID NO: 17582 - DNA, 26 bp, Homo sapiens
ttcagggtcccagggaccgtcagtct

SEQ ID NO: 17583 - DNA, 26 bp, Homo sapiens
tcagggtcccagggaccgtcagtctc

SEQ ID NO: 17584 - DNA, 26 bp, Homo sapiens
cagggtcccagggaccgtcagtctcc

SEQ ID NO: 17585 - DNA, 26 bp, Homo sapiens
agggtcccagggaccgtcagtctcct

SEQ ID NO: 17586 - DNA, 26 bp, Homo sapiens
gggtcccagggaccgtcagtctcctc

SEQ ID NO: 17587 - DNA, 26 bp, Homo sapiens
ggtcccagggaccgtcagtctcctcc

SEQ ID NO: 17588 - DNA, 26 bp, Homo sapiens
gtcccagggaccgtcagtctcctccg

SEQ ID NO: 17589 - DNA, 26 bp, Homo sapiens
tcccagggaccgtcagtctcctccgg

SEQ ID NO: 17590 - DNA, 26 bp, Homo sapiens
cccagggaccgtcagtctcctccggg

SEQ ID NO: 17591 - DNA, 26 bp, Homo sapiens
ccagggaccgtcagtctcctccgggc

SEQ ID NO: 17592 - DNA, 26 bp, Homo sapiens
cagggaccgtcagtctcctccgggct

SEQ ID NO: 17593 - DNA, 26 bp, Homo sapiens
agggaccgtcagtctcctccgggctg

SEQ ID NO: 17594 - DNA, 26 bp, Homo sapiens
gggaccgtcagtctcctccgggctgc

SEQ ID NO: 17595 - DNA, 26 bp, Homo sapiens
ggaccgtcagtctcctccgggctgct

SEQ ID NO: 17596 - DNA, 26 bp, Homo sapiens
gaccgtcagtctcctccgggctgctt

SEQ ID NO: 17597 - DNA, 26 bp, Homo sapiens
accgtcagtctcctccgggctgcttg

SEQ ID NO: 17598 - DNA, 26 bp, Homo sapiens
ccgtcagtctcctccgggctgcttga

SEQ ID NO: 17599 - DNA, 26 bp, Homo sapiens
cgtcagtctcctccgggctgcttgag

SEQ ID NO: 17600 - DNA, 26 bp, Homo sapiens
gtcagtctcctccgggctgcttgaga

SEQ ID NO: 17601 - DNA, 26 bp, Homo sapiens
tcagtctcctccgggctgcttgagac

SEQ ID NO: 17602 - DNA, 26 bp, Homo sapiens
cagtctcctccgggctgcttgagact

SEQ ID NO: 17603 - DNA, 26 bp, Homo sapiens
agtctcctccgggctgcttgagactc

SEQ ID NO: 17604 - DNA, 26 bp, Homo sapiens
gtctcctccgggctgcttgagactcc

SEQ ID NO: 17605 - DNA, 26 bp, Homo sapiens
tctcctccgggctgcttgagactccc

SEQ ID NO: 17606 - DNA, 26 bp, Homo sapiens
ctcctccgggctgcttgagactcccc

SEQ ID NO: 17607 - DNA, 26 bp, Homo sapiens
tcctccgggctgcttgagactccccg

SEQ ID NO: 17608 - DNA, 26 bp, Homo sapiens
cctccgggctgcttgagactccccga

SEQ ID NO: 17609 - DNA, 26 bp, Homo sapiens
ctccgggctgcttgagactccccgag

SEQ ID NO: 17610 - DNA, 26 bp, Homo sapiens
tccgggctgcttgagactccccgagg

SEQ ID NO: 17611 - DNA, 26 bp, Homo sapiens
ccgggctgcttgagactccccgagga

SEQ ID NO: 17612 - DNA, 26 bp, Homo sapiens
cgggctgcttgagactccccgaggac

SEQ ID NO: 17613 - DNA, 26 bp, Homo sapiens
gggctgcttgagactccccgaggaca

SEQ ID NO: 17614 - DNA, 26 bp, Homo sapiens
ggctgcttgagactccccgaggacac

SEQ ID NO: 17615 - DNA, 26 bp, Homo sapiens
gctgcttgagactccccgaggacact

SEQ ID NO: 17616 - DNA, 26 bp, Homo sapiens
aacgagtatttgtatttattaaactc

SEQ ID NO: 17617 - DNA, 26 bp, Homo sapiens
acgagtatttgtatttattaaactca

SEQ ID NO: 17618 - DNA, 26 bp, Homo sapiens
cgagtatttgtatttattaaactcat

SEQ ID NO: 17619 - DNA, 26 bp, Homo sapiens
gagtatttgtatttattaaactcatt

SEQ ID NO: 17620 - DNA, 26 bp, Homo sapiens
agtatttgtatttattaaactcatta

SEQ ID NO: 17621 - DNA, 26 bp, Homo sapiens
gtatttgtatttattaaactcattag

SEQ ID NO: 17622 - DNA, 26 bp, Homo sapiens
tatttgtatttattaaactcattagt

SEQ ID NO: 17623 - DNA, 26 bp, Homo sapiens
atttgtatttattaaactcattagtt

SEQ ID NO: 17624 - DNA, 26 bp, Homo sapiens
tttgtatttattaaactcattagttt

SEQ ID NO: 17625 - DNA, 26 bp, Homo sapiens
ttgtatttattaaactcattagtttg

SEQ ID NO: 17626 - DNA, 26 bp, Homo sapiens
tgtatttattaaactcattagtttgg

SEQ ID NO: 17627 - DNA, 26 bp, Homo sapiens
gtatttattaaactcattagtttggg

SEQ ID NO: 17628 - DNA, 26 bp, Homo sapiens
tatttattaaactcattagtttgggc

SEQ ID NO: 17629 - DNA, 26 bp, Homo sapiens
atttattaaactcattagtttgggca

SEQ ID NO: 17630 - DNA, 26 bp, Homo sapiens
tttattaaactcattagtttgggcag

SEQ ID NO: 17631 - DNA, 26 bp, Homo sapiens
ttattaaactcattagtttgggcagt

SEQ ID NO: 17632 - DNA, 26 bp, Homo sapiens
tattaaactcattagtttgggcagta

SEQ ID NO: 17633 - DNA, 26 bp, Homo sapiens
attaaactcattagtttgggcagtat

SEQ ID NO: 17634 - DNA, 26 bp, Homo sapiens
ttaaactcattagtttgggcagtata

SEQ ID NO: 17635 - DNA, 26 bp, Homo sapiens
taaactcattagtttgggcagtatac

SEQ ID NO: 17636 - DNA, 26 bp, Homo sapiens
aaactcattagtttgggcagtatact

SEQ ID NO: 17637 - DNA, 26 bp, Homo sapiens
aactcattagtttgggcagtatacta

SEQ ID NO: 17638 - DNA, 26 bp, Homo sapiens
actcattagtttgggcagtatactaa

SEQ ID NO: 17639 - DNA, 26 bp, Homo sapiens
ctcattagtttgggcagtatactaag

SEQ ID NO: 17640 - DNA, 26 bp, Homo sapiens
tcattagtttgggcagtatactaagg

SEQ ID NO: 17641 - DNA, 26 bp, Homo sapiens
cattagtttgggcagtatactaaggt

SEQ ID NO: 17642 - DNA, 26 bp, Homo sapiens
attagtttgggcagtatactaaggtg

SEQ ID NO: 17643 - DNA, 26 bp, Homo sapiens
ttagtttgggcagtatactaaggtgt

SEQ ID NO: 17644 - DNA, 26 bp, Homo sapiens
tagtttgggcagtatactaaggtgtg

SEQ ID NO: 17645 - DNA, 26 bp, Homo sapiens
agtttgggcagtatactaaggtgtgg

SEQ ID NO: 17646 - DNA, 26 bp, Homo sapiens
gtttgggcagtatactaaggtgtggc

SEQ ID NO: 17647 - DNA, 26 bp, Homo sapiens
tttgggcagtatactaaggtgtggct

SEQ ID NO: 17648 - DNA, 26 bp, Homo sapiens
ttgggcagtatactaaggtgtggctg

SEQ ID NO: 17649 - DNA, 26 bp, Homo sapiens
tgggcagtatactaaggtgtggctgt

SEQ ID NO: 17650 - DNA, 26 bp, Homo sapiens
gggcagtatactaaggtgtggctgtc

SEQ ID NO: 17651 - DNA, 26 bp, Homo sapiens
ggcagtatactaaggtgtggctgtct

SEQ ID NO: 17652 - DNA, 26 bp, Homo sapiens
gcagtatactaaggtgtggctgtctt

SEQ ID NO: 17653 - DNA, 26 bp, Homo sapiens
cagtatactaaggtgtggctgtcttg

SEQ ID NO: 17654 - DNA, 26 bp, Homo sapiens
agtatactaaggtgtggctgtcttgg

SEQ ID NO: 17655 - DNA, 26 bp, Homo sapiens
gtatactaaggtgtggctgtcttgga

SEQ ID NO: 17656 - DNA, 26 bp, Homo sapiens
tatactaaggtgtggctgtcttggat

SEQ ID NO: 17657 - DNA, 26 bp, Homo sapiens
atactaaggtgtggctgtcttggatt

SEQ ID NO: 17658 - DNA, 26 bp, Homo sapiens
tactaaggtgtggctgtcttggattc

SEQ ID NO: 17659 - DNA, 26 bp, Homo sapiens
actaaggtgtggctgtcttggattca

SEQ ID NO: 17660 - DNA, 26 bp, Homo sapiens
ctaaggtgtggctgtcttggattcag

SEQ ID NO: 17661 - DNA, 26 bp, Homo sapiens
taaggtgtggctgtcttggattcaga

SEQ ID NO: 17662 - DNA, 26 bp, Homo sapiens
aaggtgtggctgtcttggattcagat

SEQ ID NO: 17663 - DNA, 26 bp, Homo sapiens
aggtgtggctgtcttggattcagata

SEQ ID NO: 17664 - DNA, 26 bp, Homo sapiens
ggtgtggctgtcttggattcagatag

SEQ ID NO: 17665 - DNA, 26 bp, Homo sapiens
gtgtggctgtcttggattcagataga

SEQ ID NO: 17666 - DNA, 26 bp, Homo sapiens
tgtggctgtcttggattcagatagaa

SEQ ID NO: 17667 - DNA, 26 bp, Homo sapiens
gtggctgtcttggattcagatagaac

SEQ ID NO: 17668 - DNA, 26 bp, Homo sapiens
tggctgtcttggattcagatagaact

SEQ ID NO: 17669 - DNA, 26 bp, Homo sapiens
ggctgtcttggattcagatagaacta

SEQ ID NO: 17670 - DNA, 26 bp, Homo sapiens
gctgtcttggattcagatagaactaa

SEQ ID NO: 17671 - DNA, 26 bp, Homo sapiens
ctgtcttggattcagatagaactaag

SEQ ID NO: 17672 - DNA, 26 bp, Homo sapiens
tgtcttggattcagatagaactaagg

SEQ ID NO: 17673 - DNA, 26 bp, Homo sapiens
gtcttggattcagatagaactaaggg

SEQ ID NO: 17674 - DNA, 26 bp, Homo sapiens
tcttggattcagatagaactaagggt

SEQ ID NO: 17675 - DNA, 26 bp, Homo sapiens
cttggattcagatagaactaagggtt

SEQ ID NO: 17676 - DNA, 26 bp, Homo sapiens
ttggattcagatagaactaagggttc

SEQ ID NO: 17677 - DNA, 26 bp, Homo sapiens
tggattcagatagaactaagggttcc

SEQ ID NO: 17678 - DNA, 26 bp, Homo sapiens
ggattcagatagaactaagggttccc

SEQ ID NO: 17679 - DNA, 26 bp, Homo sapiens
gattcagatagaactaagggttcccg

SEQ ID NO: 17680 - DNA, 26 bp, Homo sapiens
attcagatagaactaagggttcccga

SEQ ID NO: 17681 - DNA, 26 bp, Homo sapiens
ttcagatagaactaagggttcccgac

SEQ ID NO: 17682 - DNA, 26 bp, Homo sapiens
tcagatagaactaagggttcccgact

SEQ ID NO: 17683 - DNA, 26 bp, Homo sapiens
cagatagaactaagggttcccgactc

SEQ ID NO: 17684 - DNA, 26 bp, Homo sapiens
agatagaactaagggttcccgactct

SEQ ID NO: 17685 - DNA, 26 bp, Homo sapiens
gatagaactaagggttcccgactctg

SEQ ID NO: 17686 - DNA, 26 bp, Homo sapiens
atagaactaagggttcccgactctga

SEQ ID NO: 17687 - DNA, 26 bp, Homo sapiens
tagaactaagggttcccgactctgaa

SEQ ID NO: 17688 - DNA, 26 bp, Homo sapiens
agaactaagggttcccgactctgaat

SEQ ID NO: 17689 - DNA, 26 bp, Homo sapiens
gaactaagggttcccgactctgaatc

SEQ ID NO: 17690 - DNA, 26 bp, Homo sapiens
aactaagggttcccgactctgaatcc

SEQ ID NO: 17691 - DNA, 26 bp, Homo sapiens
actaagggttcccgactctgaatcca

SEQ ID NO: 17692 - DNA, 26 bp, Homo sapiens
ctaagggttcccgactctgaatccag

SEQ ID NO: 17693 - DNA, 26 bp, Homo sapiens
taagggttcccgactctgaatccaga

SEQ ID NO: 17694 - DNA, 26 bp, Homo sapiens
aagggttcccgactctgaatccagag

SEQ ID NO: 17695 - DNA, 26 bp, Homo sapiens
agggttcccgactctgaatccagagt

SEQ ID NO: 17696 - DNA, 26 bp, Homo sapiens
gggttcccgactctgaatccagagtc

SEQ ID NO: 17697 - DNA, 26 bp, Homo sapiens
ggttcccgactctgaatccagagtct

SEQ ID NO: 17698 - DNA, 26 bp, Homo sapiens
gttcccgactctgaatccagagtctg

SEQ ID NO: 17699 - DNA, 26 bp, Homo sapiens
ttcccgactctgaatccagagtctga

SEQ ID NO: 17700 - DNA, 26 bp, Homo sapiens
tcccgactctgaatccagagtctgag

SEQ ID NO: 17701 - DNA, 26 bp, Homo sapiens
cccgactctgaatccagagtctgagt

SEQ ID NO: 17702 - DNA, 26 bp, Homo sapiens
ccgactctgaatccagagtctgagtt

SEQ ID NO: 17703 - DNA, 26 bp, Homo sapiens
cgactctgaatccagagtctgagtta

SEQ ID NO: 17704 - DNA, 26 bp, Homo sapiens
gactctgaatccagagtctgagttaa

SEQ ID NO: 17705 - DNA, 26 bp, Homo sapiens
actctgaatccagagtctgagttaaa

SEQ ID NO: 17706 - DNA, 26 bp, Homo sapiens
ctctgaatccagagtctgagttaaat

SEQ ID NO: 17707 - DNA, 26 bp, Homo sapiens
tctgaatccagagtctgagttaaatg

SEQ ID NO: 17708 - DNA, 26 bp, Homo sapiens
ctgaatccagagtctgagttaaatgt

SEQ ID NO: 17709 - DNA, 26 bp, Homo sapiens
tgaatccagagtctgagttaaatgtt

SEQ ID NO: 17710 - DNA, 26 bp, Homo sapiens
gaatccagagtctgagttaaatgttt

SEQ ID NO: 17711 - DNA, 26 bp, Homo sapiens
aatccagagtctgagttaaatgtttc

SEQ ID NO: 17712 - DNA, 26 bp, Homo sapiens
atccagagtctgagttaaatgtttcc

SEQ ID NO: 17713 - DNA, 26 bp, Homo sapiens
tccagagtctgagttaaatgtttcca

SEQ ID NO: 17714 - DNA, 26 bp, Homo sapiens
ccagagtctgagttaaatgtttccaa

SEQ ID NO: 17715 - DNA, 26 bp, Homo sapiens
cagagtctgagttaaatgtttccaat

SEQ ID NO: 17716 - DNA, 26 bp, Homo sapiens
agagtctgagttaaatgtttccaatg

SEQ ID NO: 17717 - DNA, 26 bp, Homo sapiens
gagtctgagttaaatgtttccaatgg

SEQ ID NO: 17718 - DNA, 26 bp, Homo sapiens
agtctgagttaaatgtttccaatggt

SEQ ID NO: 17719 - DNA, 26 bp, Homo sapiens
gtctgagttaaatgtttccaatggtt

SEQ ID NO: 17720 - DNA, 26 bp, Homo sapiens
tctgagttaaatgtttccaatggttc

SEQ ID NO: 17721 - DNA, 26 bp, Homo sapiens
ctgagttaaatgtttccaatggttca

SEQ ID NO: 17722 - DNA, 26 bp, Homo sapiens
tgagttaaatgtttccaatggttcag

SEQ ID NO: 17723 - DNA, 26 bp, Homo sapiens
gagttaaatgtttccaatggttcagt

SEQ ID NO: 17724 - DNA, 26 bp, Homo sapiens
agttaaatgtttccaatggttcagtc

SEQ ID NO: 17725 - DNA, 26 bp, Homo sapiens
gttaaatgtttccaatggttcagtct

SEQ ID NO: 17726 - DNA, 26 bp, Homo sapiens
ttaaatgtttccaatggttcagtcta

SEQ ID NO: 17727 - DNA, 26 bp, Homo sapiens
taaatgtttccaatggttcagtctag

SEQ ID NO: 17728 - DNA, 26 bp, Homo sapiens
aaatgtttccaatggttcagtctagc

SEQ ID NO: 17729 - DNA, 26 bp, Homo sapiens
aatgtttccaatggttcagtctagct

SEQ ID NO: 17730 - DNA, 26 bp, Homo sapiens
atgtttccaatggttcagtctagctt

SEQ ID NO: 17731 - DNA, 26 bp, Homo sapiens
tgtttccaatggttcagtctagcttt

SEQ ID NO: 17732 - DNA, 26 bp, Homo sapiens
gtttccaatggttcagtctagctttc

SEQ ID NO: 17733 - DNA, 26 bp, Homo sapiens
tttccaatggttcagtctagctttca

SEQ ID NO: 17734 - DNA, 26 bp, Homo sapiens
ttccaatggttcagtctagctttcac

SEQ ID NO: 17735 - DNA, 26 bp, Homo sapiens
tccaatggttcagtctagctttcaca

SEQ ID NO: 17736 - DNA, 26 bp, Homo sapiens
ccaatggttcagtctagctttcacag

SEQ ID NO: 17737 - DNA, 26 bp, Homo sapiens
caatggttcagtctagctttcacagt

SEQ ID NO: 17738 - DNA, 26 bp, Homo sapiens
aatggttcagtctagctttcacagtt

SEQ ID NO: 17739 - DNA, 26 bp, Homo sapiens
atggttcagtctagctttcacagttt

SEQ ID NO: 17740 - DNA, 26 bp, Homo sapiens
tggttcagtctagctttcacagtttt

SEQ ID NO: 17741 - DNA, 26 bp, Homo sapiens
ggttcagtctagctttcacagttttt

SEQ ID NO: 17742 - DNA, 26 bp, Homo sapiens
gttcagtctagctttcacagttttta

SEQ ID NO: 17743 - DNA, 26 bp, Homo sapiens
ttcagtctagctttcacagtttttat

SEQ ID NO: 17744 - DNA, 26 bp, Homo sapiens
tcagtctagctttcacagtttttatg

SEQ ID NO: 17745 - DNA, 26 bp, Homo sapiens
cagtctagctttcacagtttttatga

SEQ ID NO: 17746 - DNA, 26 bp, Homo sapiens
agtctagctttcacagtttttatgaa

SEQ ID NO: 17747 - DNA, 26 bp, Homo sapiens
gtctagctttcacagtttttatgaat

SEQ ID NO: 17748 - DNA, 26 bp, Homo sapiens
tctagctttcacagtttttatgaata

SEQ ID NO: 17749 - DNA, 26 bp, Homo sapiens
ctagctttcacagtttttatgaataa

SEQ ID NO: 17750 - DNA, 26 bp, Homo sapiens
tagctttcacagtttttatgaataaa

SEQ ID NO: 17751 - DNA, 26 bp, Homo sapiens
agctttcacagtttttatgaataaaa

SEQ ID NO: 17752 - DNA, 26 bp, Homo sapiens
gctttcacagtttttatgaataaaag

SEQ ID NO: 17753 - DNA, 26 bp, Homo sapiens
ctttcacagtttttatgaataaaagg

SEQ ID NO: 17754 - DNA, 26 bp, Homo sapiens
tttcacagtttttatgaataaaaggc

SEQ ID NO: 17755 - DNA, 26 bp, Homo sapiens
ttcacagtttttatgaataaaaggca

SEQ ID NO: 17756 - DNA, 26 bp, Homo sapiens
tcacagtttttatgaataaaaggcat

SEQ ID NO: 17757 - DNA, 26 bp, Homo sapiens
cacagtttttatgaataaaaggcatt

SEQ ID NO: 17758 - DNA, 26 bp, Homo sapiens
acagtttttatgaataaaaggcatta

SEQ ID NO: 17759 - DNA, 26 bp, Homo sapiens
cagtttttatgaataaaaggcattaa

SEQ ID NO: 17760 - DNA, 26 bp, Homo sapiens
agtttttatgaataaaaggcattaaa

SEQ ID NO: 17761 - DNA, 26 bp, Homo sapiens
gtttttatgaataaaaggcattaaag

SEQ ID NO: 17762 - DNA, 26 bp, Homo sapiens
tttttatgaataaaaggcattaaagg

SEQ ID NO: 17763 - DNA, 26 bp, Homo sapiens
ttttatgaataaaaggcattaaaggc

SEQ ID NO: 17764 - DNA, 26 bp, Homo sapiens
tttatgaataaaaggcattaaaggct

SEQ ID NO: 17765 - DNA, 26 bp, Homo sapiens
ttatgaataaaaggcattaaaggctg

SEQ ID NO: 17766 - DNA, 26 bp, Homo sapiens
tatgaataaaaggcattaaaggctga

SEQ ID NO: 17767 - DNA, 26 bp, Homo sapiens
atgaataaaaggcattaaaggctgaa

SEQ ID NO: 17768 - DNA, 26 bp, Homo sapiens
tgaataaaaggcattaaaggctgaag

SEQ ID NO: 17769 - DNA, 26 bp, Homo sapiens
gaataaaaggcattaaaggctgaagt

SEQ ID NO: 17770 - DNA, 26 bp, Homo sapiens
aataaaaggcattaaaggctgaagta

SEQ ID NO: 17771 - DNA, 26 bp, Homo sapiens
ataaaaggcattaaaggctgaagtag

SEQ ID NO: 17772 - DNA, 26 bp, Homo sapiens
taaaaggcattaaaggctgaagtagt

SEQ ID NO: 17773 - DNA, 26 bp, Homo sapiens
aaaaggcattaaaggctgaagtagtc

SEQ ID NO: 17774 - DNA, 26 bp, Homo sapiens
aaaggcattaaaggctgaagtagtct

SEQ ID NO: 17775 - DNA, 26 bp, Homo sapiens
aaggcattaaaggctgaagtagtctg

SEQ ID NO: 17776 - DNA, 26 bp, Homo sapiens
aggcattaaaggctgaagtagtctgg

SEQ ID NO: 17777 - DNA, 26 bp, Homo sapiens
ggcattaaaggctgaagtagtctggg

SEQ ID NO: 17778 - DNA, 26 bp, Homo sapiens
gcattaaaggctgaagtagtctggga

SEQ ID NO: 17779 - DNA, 26 bp, Homo sapiens
cattaaaggctgaagtagtctgggat

SEQ ID NO: 17780 - DNA, 26 bp, Homo sapiens
attaaaggctgaagtagtctgggatt

SEQ ID NO: 17781 - DNA, 26 bp, Homo sapiens
ttaaaggctgaagtagtctgggattt

SEQ ID NO: 17782 - DNA, 26 bp, Homo sapiens
taaaggctgaagtagtctgggatttt

SEQ ID NO: 17783 - DNA, 26 bp, Homo sapiens
aaaggctgaagtagtctgggattttt

SEQ ID NO: 17784 - DNA, 26 bp, Homo sapiens
aaggctgaagtagtctgggattttta

SEQ ID NO: 17785 - DNA, 26 bp, Homo sapiens
aggctgaagtagtctgggatttttat

SEQ ID NO: 17786 - DNA, 26 bp, Homo sapiens
ggctgaagtagtctgggatttttatc

SEQ ID NO: 17787 - DNA, 26 bp, Homo sapiens
gctgaagtagtctgggatttttatct

SEQ ID NO: 17788 - DNA, 26 bp, Homo sapiens
ctgaagtagtctgggatttttatcta

SEQ ID NO: 17789 - DNA, 26 bp, Homo sapiens
tgaagtagtctgggatttttatctat

SEQ ID NO: 17790 - DNA, 26 bp, Homo sapiens
gaagtagtctgggatttttatctatt

SEQ ID NO: 17791 - DNA, 26 bp, Homo sapiens
aagtagtctgggatttttatctatta

SEQ ID NO: 17792 - DNA, 26 bp, Homo sapiens
agtagtctgggatttttatctattaa

SEQ ID NO: 17793 - DNA, 26 bp, Homo sapiens
gtagtctgggatttttatctattaag

SEQ ID NO: 17794 - DNA, 26 bp, Homo sapiens
tagtctgggatttttatctattaagc

SEQ ID NO: 17795 - DNA, 26 bp, Homo sapiens
agtctgggatttttatctattaagct

SEQ ID NO: 17796 - DNA, 26 bp, Homo sapiens
gtctgggatttttatctattaagcta

SEQ ID NO: 17797 - DNA, 26 bp, Homo sapiens
tctgggatttttatctattaagctaa

SEQ ID NO: 17798 - DNA, 26 bp, Homo sapiens
ctgggatttttatctattaagctaac

SEQ ID NO: 17799 - DNA, 26 bp, Homo sapiens
tgggatttttatctattaagctaacc

SEQ ID NO: 17800 - DNA, 26 bp, Homo sapiens
gggatttttatctattaagctaacca

SEQ ID NO: 17801 - DNA, 26 bp, Homo sapiens
ggatttttatctattaagctaaccat

SEQ ID NO: 17802 - DNA, 26 bp, Homo sapiens
gatttttatctattaagctaaccatt

SEQ ID NO: 17803 - DNA, 26 bp, Homo sapiens
atttttatctattaagctaaccattt

SEQ ID NO: 17804 - DNA, 26 bp, Homo sapiens
tttttatctattaagctaaccatttg

SEQ ID NO: 17805 - DNA, 26 bp, Homo sapiens
ttttatctattaagctaaccatttga

SEQ ID NO: 17806 - DNA, 26 bp, Homo sapiens
tttatctattaagctaaccatttgat

SEQ ID NO: 17807 - DNA, 26 bp, Homo sapiens
ttatctattaagctaaccatttgatt

SEQ ID NO: 17808 - DNA, 26 bp, Homo sapiens
tatctattaagctaaccatttgattc

SEQ ID NO: 17809 - DNA, 26 bp, Homo sapiens
atctattaagctaaccatttgattca

SEQ ID NO: 17810 - DNA, 26 bp, Homo sapiens
tctattaagctaaccatttgattcag

SEQ ID NO: 17811 - DNA, 26 bp, Homo sapiens
ctattaagctaaccatttgattcagg

SEQ ID NO: 17812 - DNA, 26 bp, Homo sapiens
tattaagctaaccatttgattcaggc

SEQ ID NO: 17813 - DNA, 26 bp, Homo sapiens
attaagctaaccatttgattcaggct

SEQ ID NO: 17814 - DNA, 26 bp, Homo sapiens
ttaagctaaccatttgattcaggctg

SEQ ID NO: 17815 - DNA, 26 bp, Homo sapiens
taagctaaccatttgattcaggctgt

SEQ ID NO: 17816 - DNA, 26 bp, Homo sapiens
aagctaaccatttgattcaggctgtt

SEQ ID NO: 17817 - DNA, 26 bp, Homo sapiens
agctaaccatttgattcaggctgttg

SEQ ID NO: 17818 - DNA, 26 bp, Homo sapiens
gctaaccatttgattcaggctgttgt

SEQ ID NO: 17819 - DNA, 26 bp, Homo sapiens
ctaaccatttgattcaggctgttgta

SEQ ID NO: 17820 - DNA, 26 bp, Homo sapiens
taaccatttgattcaggctgttgtag

SEQ ID NO: 17821 - DNA, 26 bp, Homo sapiens
aaccatttgattcaggctgttgtagg

SEQ ID NO: 17822 - DNA, 26 bp, Homo sapiens
accatttgattcaggctgttgtagga

SEQ ID NO: 17823 - DNA, 26 bp, Homo sapiens
ccatttgattcaggctgttgtaggac

SEQ ID NO: 17824 - DNA, 26 bp, Homo sapiens
catttgattcaggctgttgtaggaca

SEQ ID NO: 17825 - DNA, 26 bp, Homo sapiens
atttgattcaggctgttgtaggacat

SEQ ID NO: 17826 - DNA, 26 bp, Homo sapiens
tttgattcaggctgttgtaggacatg

SEQ ID NO: 17827 - DNA, 26 bp, Homo sapiens
ttgattcaggctgttgtaggacatgt

SEQ ID NO: 17828 - DNA, 26 bp, Homo sapiens
tgattcaggctgttgtaggacatgtt

SEQ ID NO: 17829 - DNA, 26 bp, Homo sapiens
gattcaggctgttgtaggacatgttc

SEQ ID NO: 17830 - DNA, 26 bp, Homo sapiens
attcaggctgttgtaggacatgttct

SEQ ID NO: 17831 - DNA, 26 bp, Homo sapiens
ttcaggctgttgtaggacatgttctt

SEQ ID NO: 17832 - DNA, 26 bp, Homo sapiens
tcaggctgttgtaggacatgttcttc

SEQ ID NO: 17833 - DNA, 26 bp, Homo sapiens
caggctgttgtaggacatgttcttca

SEQ ID NO: 17834 - DNA, 26 bp, Homo sapiens
aggctgttgtaggacatgttcttcag

SEQ ID NO: 17835 - DNA, 26 bp, Homo sapiens
ggctgttgtaggacatgttcttcagt

SEQ ID NO: 17836 - DNA, 26 bp, Homo sapiens
gctgttgtaggacatgttcttcagtg

SEQ ID NO: 17837 - DNA, 26 bp, Homo sapiens
ctgttgtaggacatgttcttcagtgt

SEQ ID NO: 17838 - DNA, 26 bp, Homo sapiens
tgttgtaggacatgttcttcagtgtg

SEQ ID NO: 17839 - DNA, 26 bp, Homo sapiens
gttgtaggacatgttcttcagtgtgg

SEQ ID NO: 17840 - DNA, 26 bp, Homo sapiens
ttgtaggacatgttcttcagtgtgga

SEQ ID NO: 17841 - DNA, 26 bp, Homo sapiens
tgtaggacatgttcttcagtgtggac

SEQ ID NO: 17842 - DNA, 26 bp, Homo sapiens
gtaggacatgttcttcagtgtggaca

SEQ ID NO: 17843 - DNA, 26 bp, Homo sapiens
taggacatgttcttcagtgtggacag

SEQ ID NO: 17844 - DNA, 26 bp, Homo sapiens
aggacatgttcttcagtgtggacagc

SEQ ID NO: 17845 - DNA, 26 bp, Homo sapiens
ggacatgttcttcagtgtggacagct

SEQ ID NO: 17846 - DNA, 26 bp, Homo sapiens
gacatgttcttcagtgtggacagctg

SEQ ID NO: 17847 - DNA, 26 bp, Homo sapiens
acatgttcttcagtgtggacagctgt

SEQ ID NO: 17848 - DNA, 26 bp, Homo sapiens
catgttcttcagtgtggacagctgta

SEQ ID NO: 17849 - DNA, 26 bp, Homo sapiens
atgttcttcagtgtggacagctgtat

SEQ ID NO: 17850 - DNA, 26 bp, Homo sapiens
tgttcttcagtgtggacagctgtatg

SEQ ID NO: 17851 - DNA, 26 bp, Homo sapiens
gttcttcagtgtggacagctgtatgg

SEQ ID NO: 17852 - DNA, 26 bp, Homo sapiens
ttcttcagtgtggacagctgtatggc

SEQ ID NO: 17853 - DNA, 26 bp, Homo sapiens
tcttcagtgtggacagctgtatggct

SEQ ID NO: 17854 - DNA, 26 bp, Homo sapiens
cttcagtgtggacagctgtatggctg

SEQ ID NO: 17855 - DNA, 26 bp, Homo sapiens
ttcagtgtggacagctgtatggctgt

SEQ ID NO: 17856 - DNA, 26 bp, Homo sapiens
tcagtgtggacagctgtatggctgtg

SEQ ID NO: 17857 - DNA, 26 bp, Homo sapiens
cagtgtggacagctgtatggctgtga

SEQ ID NO: 17858 - DNA, 26 bp, Homo sapiens
agtgtggacagctgtatggctgtgac

SEQ ID NO: 17859 - DNA, 26 bp, Homo sapiens
gtgtggacagctgtatggctgtgact

SEQ ID NO: 17860 - DNA, 26 bp, Homo sapiens
tgtggacagctgtatggctgtgactg

SEQ ID NO: 17861 - DNA, 26 bp, Homo sapiens
gtggacagctgtatggctgtgactgg

SEQ ID NO: 17862 - DNA, 26 bp, Homo sapiens
tggacagctgtatggctgtgactgga

SEQ ID NO: 17863 - DNA, 26 bp, Homo sapiens
ggacagctgtatggctgtgactggat

SEQ ID NO: 17864 - DNA, 26 bp, Homo sapiens
gacagctgtatggctgtgactggatc

SEQ ID NO: 17865 - DNA, 26 bp, Homo sapiens
acagctgtatggctgtgactggatca

SEQ ID NO: 17866 - DNA, 26 bp, Homo sapiens
cagctgtatggctgtgactggatcag

SEQ ID NO: 17867 - DNA, 26 bp, Homo sapiens
agctgtatggctgtgactggatcagt

SEQ ID NO: 17868 - DNA, 26 bp, Homo sapiens
gctgtatggctgtgactggatcagtg

SEQ ID NO: 17869 - DNA, 26 bp, Homo sapiens
ctgtatggctgtgactggatcagtgt

SEQ ID NO: 17870 - DNA, 26 bp, Homo sapiens
tgtatggctgtgactggatcagtgtc

SEQ ID NO: 17871 - DNA, 26 bp, Homo sapiens
gtatggctgtgactggatcagtgtcc

SEQ ID NO: 17872 - DNA, 26 bp, Homo sapiens
tatggctgtgactggatcagtgtcct

SEQ ID NO: 17873 - DNA, 26 bp, Homo sapiens
atggctgtgactggatcagtgtcctg

SEQ ID NO: 17874 - DNA, 26 bp, Homo sapiens
tggctgtgactggatcagtgtcctgc

SEQ ID NO: 17875 - DNA, 26 bp, Homo sapiens
ggctgtgactggatcagtgtcctgct

SEQ ID NO: 17876 - DNA, 26 bp, Homo sapiens
gctgtgactggatcagtgtcctgctg

SEQ ID NO: 17877 - DNA, 26 bp, Homo sapiens
ctgtgactggatcagtgtcctgctgg

SEQ ID NO: 17878 - DNA, 26 bp, Homo sapiens
tgtgactggatcagtgtcctgctggt

SEQ ID NO: 17879 - DNA, 26 bp, Homo sapiens
gtgactggatcagtgtcctgctggtg

SEQ ID NO: 17880 - DNA, 26 bp, Homo sapiens
tgactggatcagtgtcctgctggtgt

SEQ ID NO: 17881 - DNA, 26 bp, Homo sapiens
gactggatcagtgtcctgctggtgta

SEQ ID NO: 17882 - DNA, 26 bp, Homo sapiens
actggatcagtgtcctgctggtgtac

SEQ ID NO: 17883 - DNA, 26 bp, Homo sapiens
ctggatcagtgtcctgctggtgtaca

SEQ ID NO: 17884 - DNA, 26 bp, Homo sapiens
tggatcagtgtcctgctggtgtacac

SEQ ID NO: 17885 - DNA, 26 bp, Homo sapiens
ggatcagtgtcctgctggtgtacaca

SEQ ID NO: 17886 - DNA, 26 bp, Homo sapiens
gatcagtgtcctgctggtgtacacac

SEQ ID NO: 17887 - DNA, 26 bp, Homo sapiens
atcagtgtcctgctggtgtacacaca

SEQ ID NO: 17888 - DNA, 26 bp, Homo sapiens
tcagtgtcctgctggtgtacacacag

SEQ ID NO: 17889 - DNA, 26 bp, Homo sapiens
cagtgtcctgctggtgtacacacagg

SEQ ID NO: 17890 - DNA, 26 bp, Homo sapiens
agtgtcctgctggtgtacacacaggt

SEQ ID NO: 17891 - DNA, 26 bp, Homo sapiens
gtgtcctgctggtgtacacacaggtg

SEQ ID NO: 17892 - DNA, 26 bp, Homo sapiens
tgtcctgctggtgtacacacaggtga

SEQ ID NO: 17893 - DNA, 26 bp, Homo sapiens
gtcctgctggtgtacacacaggtgag

SEQ ID NO: 17894 - DNA, 26 bp, Homo sapiens
tcctgctggtgtacacacaggtgagg

SEQ ID NO: 17895 - DNA, 26 bp, Homo sapiens
cctgctggtgtacacacaggtgagga

SEQ ID NO: 17896 - DNA, 26 bp, Homo sapiens
ctgctggtgtacacacaggtgaggac

SEQ ID NO: 17897 - DNA, 26 bp, Homo sapiens
tgctggtgtacacacaggtgaggacc

SEQ ID NO: 17898 - DNA, 26 bp, Homo sapiens
gctggtgtacacacaggtgaggacct

SEQ ID NO: 17899 - DNA, 26 bp, Homo sapiens
ctggtgtacacacaggtgaggacctg

SEQ ID NO: 17900 - DNA, 26 bp, Homo sapiens
tggtgtacacacaggtgaggacctgg

SEQ ID NO: 17901 - DNA, 26 bp, Homo sapiens
ggtgtacacacaggtgaggacctggc

SEQ ID NO: 17902 - DNA, 26 bp, Homo sapiens
gtgtacacacaggtgaggacctggct

SEQ ID NO: 17903 - DNA, 26 bp, Homo sapiens
tgtacacacaggtgaggacctggctg

SEQ ID NO: 17904 - DNA, 26 bp, Homo sapiens
gtacacacaggtgaggacctggctgg

SEQ ID NO: 17905 - DNA, 26 bp, Homo sapiens
tacacacaggtgaggacctggctggc

SEQ ID NO: 17906 - DNA, 26 bp, Homo sapiens
acacacaggtgaggacctggctggcg

SEQ ID NO: 17907 - DNA, 26 bp, Homo sapiens
cacacaggtgaggacctggctggcga

SEQ ID NO: 17908 - DNA, 26 bp, Homo sapiens
acacaggtgaggacctggctggcgaa

SEQ ID NO: 17909 - DNA, 26 bp, Homo sapiens
cacaggtgaggacctggctggcgaag

SEQ ID NO: 17910 - DNA, 26 bp, Homo sapiens
acaggtgaggacctggctggcgaagc

SEQ ID NO: 17911 - DNA, 26 bp, Homo sapiens
caggtgaggacctggctggcgaagca

SEQ ID NO: 17912 - DNA, 26 bp, Homo sapiens
aggtgaggacctggctggcgaagcat

SEQ ID NO: 17913 - DNA, 26 bp, Homo sapiens
ggtgaggacctggctggcgaagcatc

SEQ ID NO: 17914 - DNA, 26 bp, Homo sapiens
gtgaggacctggctggcgaagcatcc

SEQ ID NO: 17915 - DNA, 26 bp, Homo sapiens
tgaggacctggctggcgaagcatccc

SEQ ID NO: 17916 - DNA, 26 bp, Homo sapiens
gaggacctggctggcgaagcatcccc

SEQ ID NO: 17917 - DNA, 26 bp, Homo sapiens
aggacctggctggcgaagcatcccca

SEQ ID NO: 17918 - DNA, 26 bp, Homo sapiens
ggacctggctggcgaagcatccccat

SEQ ID NO: 17919 - DNA, 26 bp, Homo sapiens
gacctggctggcgaagcatccccatt

SEQ ID NO: 17920 - DNA, 26 bp, Homo sapiens
acctggctggcgaagcatccccatta

SEQ ID NO: 17921 - DNA, 26 bp, Homo sapiens
cctggctggcgaagcatccccattag

SEQ ID NO: 17922 - DNA, 26 bp, Homo sapiens
ctggctggcgaagcatccccattagg

SEQ ID NO: 17923 - DNA, 26 bp, Homo sapiens
tggctggcgaagcatccccattagga

SEQ ID NO: 17924 - DNA, 26 bp, Homo sapiens
ggctggcgaagcatccccattaggaa

SEQ ID NO: 17925 - DNA, 26 bp, Homo sapiens
gctggcgaagcatccccattaggaag

SEQ ID NO: 17926 - DNA, 26 bp, Homo sapiens
ctggcgaagcatccccattaggaagc

SEQ ID NO: 17927 - DNA, 26 bp, Homo sapiens
tggcgaagcatccccattaggaagca

SEQ ID NO: 17928 - DNA, 26 bp, Homo sapiens
ggcgaagcatccccattaggaagcag

SEQ ID NO: 17929 - DNA, 26 bp, Homo sapiens
gcgaagcatccccattaggaagcagg

SEQ ID NO: 17930 - DNA, 26 bp, Homo sapiens
cgaagcatccccattaggaagcaggt

SEQ ID NO: 17931 - DNA, 26 bp, Homo sapiens
gaagcatccccattaggaagcaggtt

SEQ ID NO: 17932 - DNA, 26 bp, Homo sapiens
aagcatccccattaggaagcaggtta

SEQ ID NO: 17933 - DNA, 26 bp, Homo sapiens
agcatccccattaggaagcaggttag

SEQ ID NO: 17934 - DNA, 26 bp, Homo sapiens
gcatccccattaggaagcaggttagg

SEQ ID NO: 17935 - DNA, 26 bp, Homo sapiens
catccccattaggaagcaggttagga

SEQ ID NO: 17936 - DNA, 26 bp, Homo sapiens
atccccattaggaagcaggttaggaa

SEQ ID NO: 17937 - DNA, 26 bp, Homo sapiens
tccccattaggaagcaggttaggaat

SEQ ID NO: 17938 - DNA, 26 bp, Homo sapiens
ccccattaggaagcaggttaggaatg

SEQ ID NO: 17939 - DNA, 26 bp, Homo sapiens
cccattaggaagcaggttaggaatgt

SEQ ID NO: 17940 - DNA, 26 bp, Homo sapiens
ccattaggaagcaggttaggaatgtg

SEQ ID NO: 17941 - DNA, 26 bp, Homo sapiens
cattaggaagcaggttaggaatgtgc

SEQ ID NO: 17942 - DNA, 26 bp, Homo sapiens
attaggaagcaggttaggaatgtgct

SEQ ID NO: 17943 - DNA, 26 bp, Homo sapiens
ttaggaagcaggttaggaatgtgctt

SEQ ID NO: 17944 - DNA, 26 bp, Homo sapiens
taggaagcaggttaggaatgtgcttc

SEQ ID NO: 17945 - DNA, 26 bp, Homo sapiens
aggaagcaggttaggaatgtgcttca

SEQ ID NO: 17946 - DNA, 26 bp, Homo sapiens
ggaagcaggttaggaatgtgcttcat

SEQ ID NO: 17947 - DNA, 26 bp, Homo sapiens
gaagcaggttaggaatgtgcttcatc

SEQ ID NO: 17948 - DNA, 26 bp, Homo sapiens
aagcaggttaggaatgtgcttcatcc

SEQ ID NO: 17949 - DNA, 26 bp, Homo sapiens
agcaggttaggaatgtgcttcatccc

SEQ ID NO: 17950 - DNA, 26 bp, Homo sapiens
gcaggttaggaatgtgcttcatccct

SEQ ID NO: 17951 - DNA, 26 bp, Homo sapiens
caggttaggaatgtgcttcatccctg

SEQ ID NO: 17952 - DNA, 26 bp, Homo sapiens
aggttaggaatgtgcttcatccctgt

SEQ ID NO: 17953 - DNA, 26 bp, Homo sapiens
ggttaggaatgtgcttcatccctgtt

SEQ ID NO: 17954 - DNA, 26 bp, Homo sapiens
gttaggaatgtgcttcatccctgttt

SEQ ID NO: 17955 - DNA, 26 bp, Homo sapiens
ttaggaatgtgcttcatccctgtttt

SEQ ID NO: 17956 - DNA, 26 bp, Homo sapiens
taggaatgtgcttcatccctgttttc

SEQ ID NO: 17957 - DNA, 26 bp, Homo sapiens
aggaatgtgcttcatccctgttttcc

SEQ ID NO: 17958 - DNA, 26 bp, Homo sapiens
ggaatgtgcttcatccctgttttcca

SEQ ID NO: 17959 - DNA, 26 bp, Homo sapiens
gaatgtgcttcatccctgttttccaa

SEQ ID NO: 17960 - DNA, 26 bp, Homo sapiens
aatgtgcttcatccctgttttccaag

SEQ ID NO: 17961 - DNA, 26 bp, Homo sapiens
atgtgcttcatccctgttttccaagg

SEQ ID NO: 17962 - DNA, 26 bp, Homo sapiens
tgtgcttcatccctgttttccaaggc

SEQ ID NO: 17963 - DNA, 26 bp, Homo sapiens
gtgcttcatccctgttttccaaggcc

SEQ ID NO: 17964 - DNA, 26 bp, Homo sapiens
tgcttcatccctgttttccaaggccc

SEQ ID NO: 17965 - DNA, 26 bp, Homo sapiens
gcttcatccctgttttccaaggccca

SEQ ID NO: 17966 - DNA, 26 bp, Homo sapiens
cttcatccctgttttccaaggcccaa

SEQ ID NO: 17967 - DNA, 26 bp, Homo sapiens
ttcatccctgttttccaaggcccaat

SEQ ID NO: 17968 - DNA, 26 bp, Homo sapiens
tcatccctgttttccaaggcccaata

SEQ ID NO: 17969 - DNA, 26 bp, Homo sapiens
catccctgttttccaaggcccaataa

SEQ ID NO: 17970 - DNA, 26 bp, Homo sapiens
atccctgttttccaaggcccaataag

SEQ ID NO: 17971 - DNA, 26 bp, Homo sapiens
tccctgttttccaaggcccaataagg

SEQ ID NO: 17972 - DNA, 26 bp, Homo sapiens
ccctgttttccaaggcccaataagga

SEQ ID NO: 17973 - DNA, 26 bp, Homo sapiens
cctgttttccaaggcccaataaggat

SEQ ID NO: 17974 - DNA, 26 bp, Homo sapiens
ctgttttccaaggcccaataaggatc

SEQ ID NO: 17975 - DNA, 26 bp, Homo sapiens
tgttttccaaggcccaataaggatcc

SEQ ID NO: 17976 - DNA, 26 bp, Homo sapiens
gttttccaaggcccaataaggatcca

SEQ ID NO: 17977 - DNA, 26 bp, Homo sapiens
ttttccaaggcccaataaggatccat

SEQ ID NO: 17978 - DNA, 26 bp, Homo sapiens
tttccaaggcccaataaggatccatg

SEQ ID NO: 17979 - DNA, 26 bp, Homo sapiens
ttccaaggcccaataaggatccatgt

SEQ ID NO: 17980 - DNA, 26 bp, Homo sapiens
tccaaggcccaataaggatccatgtg

SEQ ID NO: 17981 - DNA, 26 bp, Homo sapiens
ccaaggcccaataaggatccatgtga

SEQ ID NO: 17982 - DNA, 26 bp, Homo sapiens
caaggcccaataaggatccatgtgat

SEQ ID NO: 17983 - DNA, 26 bp, Homo sapiens
aaggcccaataaggatccatgtgatc

SEQ ID NO: 17984 - DNA, 26 bp, Homo sapiens
aggcccaataaggatccatgtgatct

SEQ ID NO: 17985 - DNA, 26 bp, Homo sapiens
ggcccaataaggatccatgtgatctt

SEQ ID NO: 17986 - DNA, 26 bp, Homo sapiens
gcccaataaggatccatgtgatcttt

SEQ ID NO: 17987 - DNA, 26 bp, Homo sapiens
cccaataaggatccatgtgatctttg

SEQ ID NO: 17988 - DNA, 26 bp, Homo sapiens
ccaataaggatccatgtgatctttga

SEQ ID NO: 17989 - DNA, 26 bp, Homo sapiens
caataaggatccatgtgatctttgag

SEQ ID NO: 17990 - DNA, 26 bp, Homo sapiens
aataaggatccatgtgatctttgagt

SEQ ID NO: 17991 - DNA, 26 bp, Homo sapiens
ataaggatccatgtgatctttgagtg

SEQ ID NO: 17992 - DNA, 26 bp, Homo sapiens
taaggatccatgtgatctttgagtgt

SEQ ID NO: 17993 - DNA, 26 bp, Homo sapiens
aaggatccatgtgatctttgagtgta

SEQ ID NO: 17994 - DNA, 26 bp, Homo sapiens
aggatccatgtgatctttgagtgtag

SEQ ID NO: 17995 - DNA, 26 bp, Homo sapiens
ggatccatgtgatctttgagtgtagt

SEQ ID NO: 17996 - DNA, 26 bp, Homo sapiens
gatccatgtgatctttgagtgtagtg

SEQ ID NO: 17997 - DNA, 26 bp, Homo sapiens
atccatgtgatctttgagtgtagtgt

SEQ ID NO: 17998 - DNA, 26 bp, Homo sapiens
tccatgtgatctttgagtgtagtgtg

SEQ ID NO: 17999 - DNA, 26 bp, Homo sapiens
ccatgtgatctttgagtgtagtgtgt

SEQ ID NO: 18000 - DNA, 26 bp, Homo sapiens
catgtgatctttgagtgtagtgtgta

SEQ ID NO: 18001 - DNA, 26 bp, Homo sapiens
atgtgatctttgagtgtagtgtgtat

SEQ ID NO: 18002 - DNA, 26 bp, Homo sapiens
tgtgatctttgagtgtagtgtgtatg

SEQ ID NO: 18003 - DNA, 26 bp, Homo sapiens
gtgatctttgagtgtagtgtgtatgt

SEQ ID NO: 18004 - DNA, 26 bp, Homo sapiens
tgatctttgagtgtagtgtgtatgtt

SEQ ID NO: 18005 - DNA, 26 bp, Homo sapiens
gatctttgagtgtagtgtgtatgttg

SEQ ID NO: 18006 - DNA, 26 bp, Homo sapiens
atctttgagtgtagtgtgtatgttgg

SEQ ID NO: 18007 - DNA, 26 bp, Homo sapiens
tctttgagtgtagtgtgtatgttggt

SEQ ID NO: 18008 - DNA, 26 bp, Homo sapiens
ctttgagtgtagtgtgtatgttggtt

SEQ ID NO: 18009 - DNA, 26 bp, Homo sapiens
tttgagtgtagtgtgtatgttggttg

SEQ ID NO: 18010 - DNA, 26 bp, Homo sapiens
ttgagtgtagtgtgtatgttggttgg

SEQ ID NO: 18011 - DNA, 26 bp, Homo sapiens
tgagtgtagtgtgtatgttggttggt

SEQ ID NO: 18012 - DNA, 26 bp, Homo sapiens
gagtgtagtgtgtatgttggttggtg

SEQ ID NO: 18013 - DNA, 26 bp, Homo sapiens
agtgtagtgtgtatgttggttggtga

SEQ ID NO: 18014 - DNA, 26 bp, Homo sapiens
gtgtagtgtgtatgttggttggtgat

SEQ ID NO: 18015 - DNA, 26 bp, Homo sapiens
tgtagtgtgtatgttggttggtgatt

SEQ ID NO: 18016 - DNA, 26 bp, Homo sapiens
gtagtgtgtatgttggttggtgattg

SEQ ID NO: 18017 - DNA, 26 bp, Homo sapiens
tagtgtgtatgttggttggtgattgt

SEQ ID NO: 18018 - DNA, 26 bp, Homo sapiens
agtgtgtatgttggttggtgattgtt

SEQ ID NO: 18019 - DNA, 26 bp, Homo sapiens
gtgtgtatgttggttggtgattgttc

SEQ ID NO: 18020 - DNA, 26 bp, Homo sapiens
tgtgtatgttggttggtgattgttcc

SEQ ID NO: 18021 - DNA, 26 bp, Homo sapiens
gtgtatgttggttggtgattgttcca

SEQ ID NO: 18022 - DNA, 26 bp, Homo sapiens
tgtatgttggttggtgattgttccaa

SEQ ID NO: 18023 - DNA, 26 bp, Homo sapiens
gtatgttggttggtgattgttccaaa

SEQ ID NO: 18024 - DNA, 26 bp, Homo sapiens
tatgttggttggtgattgttccaaag

SEQ ID NO: 18025 - DNA, 26 bp, Homo sapiens
atgttggttggtgattgttccaaagg

SEQ ID NO: 18026 - DNA, 26 bp, Homo sapiens
tgttggttggtgattgttccaaaggt

SEQ ID NO: 18027 - DNA, 26 bp, Homo sapiens
gttggttggtgattgttccaaaggtt

SEQ ID NO: 18028 - DNA, 26 bp, Homo sapiens
ttggttggtgattgttccaaaggttc

SEQ ID NO: 18029 - DNA, 26 bp, Homo sapiens
tggttggtgattgttccaaaggttct

SEQ ID NO: 18030 - DNA, 26 bp, Homo sapiens
ggttggtgattgttccaaaggttctt

SEQ ID NO: 18031 - DNA, 26 bp, Homo sapiens
gttggtgattgttccaaaggttcttt

SEQ ID NO: 18032 - DNA, 26 bp, Homo sapiens
ttggtgattgttccaaaggttctttg

SEQ ID NO: 18033 - DNA, 26 bp, Homo sapiens
tggtgattgttccaaaggttctttga

SEQ ID NO: 18034 - DNA, 26 bp, Homo sapiens
ggtgattgttccaaaggttctttgag

SEQ ID NO: 18035 - DNA, 26 bp, Homo sapiens
gtgattgttccaaaggttctttgagg

SEQ ID NO: 18036 - DNA, 26 bp, Homo sapiens
tgattgttccaaaggttctttgaggt

SEQ ID NO: 18037 - DNA, 26 bp, Homo sapiens
gattgttccaaaggttctttgaggtg

SEQ ID NO: 18038 - DNA, 26 bp, Homo sapiens
attgttccaaaggttctttgaggtga

SEQ ID NO: 18039 - DNA, 26 bp, Homo sapiens
ttgttccaaaggttctttgaggtgat

SEQ ID NO: 18040 - DNA, 26 bp, Homo sapiens
tgttccaaaggttctttgaggtgatt

SEQ ID NO: 18041 - DNA, 26 bp, Homo sapiens
gttccaaaggttctttgaggtgattt

SEQ ID NO: 18042 - DNA, 26 bp, Homo sapiens
ttccaaaggttctttgaggtgatttt

SEQ ID NO: 18043 - DNA, 26 bp, Homo sapiens
tccaaaggttctttgaggtgattttc

SEQ ID NO: 18044 - DNA, 26 bp, Homo sapiens
ccaaaggttctttgaggtgattttcg

SEQ ID NO: 18045 - DNA, 26 bp, Homo sapiens
caaaggttctttgaggtgattttcgg

SEQ ID NO: 18046 - DNA, 26 bp, Homo sapiens
aaaggttctttgaggtgattttcggg

SEQ ID NO: 18047 - DNA, 26 bp, Homo sapiens
aaggttctttgaggtgattttcgggg

SEQ ID NO: 18048 - DNA, 26 bp, Homo sapiens
aggttctttgaggtgattttcgggga

SEQ ID NO: 18049 - DNA, 26 bp, Homo sapiens
ggttctttgaggtgattttcggggat

SEQ ID NO: 18050 - DNA, 26 bp, Homo sapiens
gttctttgaggtgattttcggggatc

SEQ ID NO: 18051 - DNA, 26 bp, Homo sapiens
ttctttgaggtgattttcggggatct

SEQ ID NO: 18052 - DNA, 26 bp, Homo sapiens
tctttgaggtgattttcggggatctc

SEQ ID NO: 18053 - DNA, 26 bp, Homo sapiens
ctttgaggtgattttcggggatctct

SEQ ID NO: 18054 - DNA, 26 bp, Homo sapiens
tttgaggtgattttcggggatctctg

SEQ ID NO: 18055 - DNA, 26 bp, Homo sapiens
ttgaggtgattttcggggatctctgg

SEQ ID NO: 18056 - DNA, 26 bp, Homo sapiens
tgaggtgattttcggggatctctggc

SEQ ID NO: 18057 - DNA, 26 bp, Homo sapiens
gaggtgattttcggggatctctggca

SEQ ID NO: 18058 - DNA, 26 bp, Homo sapiens
aggtgattttcggggatctctggcat

SEQ ID NO: 18059 - DNA, 26 bp, Homo sapiens
ggtgattttcggggatctctggcata

SEQ ID NO: 18060 - DNA, 26 bp, Homo sapiens
gtgattttcggggatctctggcatat

SEQ ID NO: 18061 - DNA, 26 bp, Homo sapiens
tgattttcggggatctctggcatatc

SEQ ID NO: 18062 - DNA, 26 bp, Homo sapiens
gattttcggggatctctggcatatcc

SEQ ID NO: 18063 - DNA, 26 bp, Homo sapiens
attttcggggatctctggcatatccg

SEQ ID NO: 18064 - DNA, 26 bp, Homo sapiens
ttttcggggatctctggcatatccgt

SEQ ID NO: 18065 - DNA, 26 bp, Homo sapiens
tttcggggatctctggcatatccgtc

SEQ ID NO: 18066 - DNA, 26 bp, Homo sapiens
ttcggggatctctggcatatccgtca

SEQ ID NO: 18067 - DNA, 26 bp, Homo sapiens
tcggggatctctggcatatccgtcag

SEQ ID NO: 18068 - DNA, 26 bp, Homo sapiens
cggggatctctggcatatccgtcagg

SEQ ID NO: 18069 - DNA, 26 bp, Homo sapiens
ggggatctctggcatatccgtcaggt

SEQ ID NO: 18070 - DNA, 26 bp, Homo sapiens
gggatctctggcatatccgtcaggtt

SEQ ID NO: 18071 - DNA, 26 bp, Homo sapiens
ggatctctggcatatccgtcaggtta

SEQ ID NO: 18072 - DNA, 26 bp, Homo sapiens
gatctctggcatatccgtcaggttaa

SEQ ID NO: 18073 - DNA, 26 bp, Homo sapiens
atctctggcatatccgtcaggttaaa

SEQ ID NO: 18074 - DNA, 26 bp, Homo sapiens
tctctggcatatccgtcaggttaaac

SEQ ID NO: 18075 - DNA, 26 bp, Homo sapiens
ctctggcatatccgtcaggttaaact

SEQ ID NO: 18076 - DNA, 26 bp, Homo sapiens
tctggcatatccgtcaggttaaactc

SEQ ID NO: 18077 - DNA, 26 bp, Homo sapiens
ctggcatatccgtcaggttaaactcc

SEQ ID NO: 18078 - DNA, 26 bp, Homo sapiens
tggcatatccgtcaggttaaactcca

SEQ ID NO: 18079 - DNA, 26 bp, Homo sapiens
ggcatatccgtcaggttaaactccac

SEQ ID NO: 18080 - DNA, 26 bp, Homo sapiens
gcatatccgtcaggttaaactccaca

SEQ ID NO: 18081 - DNA, 26 bp, Homo sapiens
catatccgtcaggttaaactccacag

SEQ ID NO: 18082 - DNA, 26 bp, Homo sapiens
atatccgtcaggttaaactccacagt

SEQ ID NO: 18083 - DNA, 26 bp, Homo sapiens
tatccgtcaggttaaactccacagtt

SEQ ID NO: 18084 - DNA, 26 bp, Homo sapiens
atccgtcaggttaaactccacagttt

SEQ ID NO: 18085 - DNA, 26 bp, Homo sapiens
tccgtcaggttaaactccacagtttt

SEQ ID NO: 18086 - DNA, 26 bp, Homo sapiens
ccgtcaggttaaactccacagttttc

SEQ ID NO: 18087 - DNA, 26 bp, Homo sapiens
cgtcaggttaaactccacagttttcc

SEQ ID NO: 18088 - DNA, 26 bp, Homo sapiens
gtcaggttaaactccacagttttcct

SEQ ID NO: 18089 - DNA, 26 bp, Homo sapiens
tcaggttaaactccacagttttcctc

SEQ ID NO: 18090 - DNA, 26 bp, Homo sapiens
caggttaaactccacagttttcctcc

SEQ ID NO: 18091 - DNA, 26 bp, Homo sapiens
aggttaaactccacagttttcctcct

SEQ ID NO: 18092 - DNA, 26 bp, Homo sapiens
ggttaaactccacagttttcctcctc

SEQ ID NO: 18093 - DNA, 26 bp, Homo sapiens
gttaaactccacagttttcctcctca

SEQ ID NO: 18094 - DNA, 26 bp, Homo sapiens
ttaaactccacagttttcctcctcac

SEQ ID NO: 18095 - DNA, 26 bp, Homo sapiens
taaactccacagttttcctcctcact

SEQ ID NO: 18096 - DNA, 26 bp, Homo sapiens
aaactccacagttttcctcctcactt

SEQ ID NO: 18097 - DNA, 26 bp, Homo sapiens
aactccacagttttcctcctcacttg

SEQ ID NO: 18098 - DNA, 26 bp, Homo sapiens
actccacagttttcctcctcacttga

SEQ ID NO: 18099 - DNA, 26 bp, Homo sapiens
ctccacagttttcctcctcacttgag

SEQ ID NO: 18100 - DNA, 26 bp, Homo sapiens
tccacagttttcctcctcacttgaga

SEQ ID NO: 18101 - DNA, 26 bp, Homo sapiens
ccacagttttcctcctcacttgagat

SEQ ID NO: 18102 - DNA, 26 bp, Homo sapiens
cacagttttcctcctcacttgagata

SEQ ID NO: 18103 - DNA, 26 bp, Homo sapiens
acagttttcctcctcacttgagatac

SEQ ID NO: 18104 - DNA, 26 bp, Homo sapiens
cagttttcctcctcacttgagatact

SEQ ID NO: 18105 - DNA, 26 bp, Homo sapiens
agttttcctcctcacttgagatactt

SEQ ID NO: 18106 - DNA, 26 bp, Homo sapiens
gttttcctcctcacttgagatacttc

SEQ ID NO: 18107 - DNA, 26 bp, Homo sapiens
ttttcctcctcacttgagatacttct

SEQ ID NO: 18108 - DNA, 26 bp, Homo sapiens
tttcctcctcacttgagatacttctg

SEQ ID NO: 18109 - DNA, 26 bp, Homo sapiens
ttcctcctcacttgagatacttctgg

SEQ ID NO: 18110 - DNA, 26 bp, Homo sapiens
tcctcctcacttgagatacttctggg

SEQ ID NO: 18111 - DNA, 26 bp, Homo sapiens
cctcctcacttgagatacttctgggt

SEQ ID NO: 18112 - DNA, 26 bp, Homo sapiens
ctcctcacttgagatacttctgggtg

SEQ ID NO: 18113 - DNA, 26 bp, Homo sapiens
tcctcacttgagatacttctgggtgc

SEQ ID NO: 18114 - DNA, 26 bp, Homo sapiens
cctcacttgagatacttctgggtgct

SEQ ID NO: 18115 - DNA, 26 bp, Homo sapiens
ctcacttgagatacttctgggtgctc

SEQ ID NO: 18116 - DNA, 26 bp, Homo sapiens
tcacttgagatacttctgggtgctcc

SEQ ID NO: 18117 - DNA, 26 bp, Homo sapiens
cacttgagatacttctgggtgctcca

SEQ ID NO: 18118 - DNA, 26 bp, Homo sapiens
acttgagatacttctgggtgctccat

SEQ ID NO: 18119 - DNA, 26 bp, Homo sapiens
cttgagatacttctgggtgctccatc

SEQ ID NO: 18120 - DNA, 26 bp, Homo sapiens
ttgagatacttctgggtgctccatca

SEQ ID NO: 18121 - DNA, 26 bp, Homo sapiens
tgagatacttctgggtgctccatcaa

SEQ ID NO: 18122 - DNA, 26 bp, Homo sapiens
gagatacttctgggtgctccatcaag

SEQ ID NO: 18123 - DNA, 26 bp, Homo sapiens
agatacttctgggtgctccatcaagg

SEQ ID NO: 18124 - DNA, 26 bp, Homo sapiens
gatacttctgggtgctccatcaaggc

SEQ ID NO: 18125 - DNA, 26 bp, Homo sapiens
atacttctgggtgctccatcaaggcc

SEQ ID NO: 18126 - DNA, 26 bp, Homo sapiens
tacttctgggtgctccatcaaggccc

SEQ ID NO: 18127 - DNA, 26 bp, Homo sapiens
acttctgggtgctccatcaaggcccc

SEQ ID NO: 18128 - DNA, 26 bp, Homo sapiens
cttctgggtgctccatcaaggcccca

SEQ ID NO: 18129 - DNA, 26 bp, Homo sapiens
ttctgggtgctccatcaaggccccat

SEQ ID NO: 18130 - DNA, 26 bp, Homo sapiens
tctgggtgctccatcaaggccccatc

SEQ ID NO: 18131 - DNA, 26 bp, Homo sapiens
ctgggtgctccatcaaggccccatcg

SEQ ID NO: 18132 - DNA, 26 bp, Homo sapiens
tgggtgctccatcaaggccccatcgc

SEQ ID NO: 18133 - DNA, 26 bp, Homo sapiens
gggtgctccatcaaggccccatcgct

SEQ ID NO: 18134 - DNA, 26 bp, Homo sapiens
ggtgctccatcaaggccccatcgctc

SEQ ID NO: 18135 - DNA, 26 bp, Homo sapiens
gtgctccatcaaggccccatcgctct

SEQ ID NO: 18136 - DNA, 26 bp, Homo sapiens
tgctccatcaaggccccatcgctctc

SEQ ID NO: 18137 - DNA, 26 bp, Homo sapiens
gctccatcaaggccccatcgctctct

SEQ ID NO: 18138 - DNA, 26 bp, Homo sapiens
ctccatcaaggccccatcgctctctg

SEQ ID NO: 18139 - DNA, 26 bp, Homo sapiens
tccatcaaggccccatcgctctctga

SEQ ID NO: 18140 - DNA, 26 bp, Homo sapiens
ccatcaaggccccatcgctctctgag

SEQ ID NO: 18141 - DNA, 26 bp, Homo sapiens
catcaaggccccatcgctctctgaga

SEQ ID NO: 18142 - DNA, 26 bp, Homo sapiens
atcaaggccccatcgctctctgagag

SEQ ID NO: 18143 - DNA, 26 bp, Homo sapiens
tcaaggccccatcgctctctgagagc

SEQ ID NO: 18144 - DNA, 26 bp, Homo sapiens
caaggccccatcgctctctgagagca

SEQ ID NO: 18145 - DNA, 26 bp, Homo sapiens
aaggccccatcgctctctgagagcaa

SEQ ID NO: 18146 - DNA, 26 bp, Homo sapiens
aggccccatcgctctctgagagcaat

SEQ ID NO: 18147 - DNA, 26 bp, Homo sapiens
ggccccatcgctctctgagagcaatt

SEQ ID NO: 18148 - DNA, 26 bp, Homo sapiens
gccccatcgctctctgagagcaattc

SEQ ID NO: 18149 - DNA, 26 bp, Homo sapiens
ccccatcgctctctgagagcaattca

SEQ ID NO: 18150 - DNA, 26 bp, Homo sapiens
cccatcgctctctgagagcaattcaa

SEQ ID NO: 18151 - DNA, 26 bp, Homo sapiens
ccatcgctctctgagagcaattcaaa

SEQ ID NO: 18152 - DNA, 26 bp, Homo sapiens
catcgctctctgagagcaattcaaaa

SEQ ID NO: 18153 - DNA, 26 bp, Homo sapiens
atcgctctctgagagcaattcaaaac

SEQ ID NO: 18154 - DNA, 26 bp, Homo sapiens
tcgctctctgagagcaattcaaaact

SEQ ID NO: 18155 - DNA, 26 bp, Homo sapiens
cgctctctgagagcaattcaaaactt

SEQ ID NO: 18156 - DNA, 26 bp, Homo sapiens
gctctctgagagcaattcaaaacttt

SEQ ID NO: 18157 - DNA, 26 bp, Homo sapiens
ctctctgagagcaattcaaaactttt

SEQ ID NO: 18158 - DNA, 26 bp, Homo sapiens
tctctgagagcaattcaaaacttttc

SEQ ID NO: 18159 - DNA, 26 bp, Homo sapiens
ctctgagagcaattcaaaacttttct

SEQ ID NO: 18160 - DNA, 26 bp, Homo sapiens
tctgagagcaattcaaaacttttctt

SEQ ID NO: 18161 - DNA, 26 bp, Homo sapiens
ctgagagcaattcaaaacttttcttg

SEQ ID NO: 18162 - DNA, 26 bp, Homo sapiens
tgagagcaattcaaaacttttcttgg

SEQ ID NO: 18163 - DNA, 26 bp, Homo sapiens
gagagcaattcaaaacttttcttggc

SEQ ID NO: 18164 - DNA, 26 bp, Homo sapiens
agagcaattcaaaacttttcttggcc

SEQ ID NO: 18165 - DNA, 26 bp, Homo sapiens
gagcaattcaaaacttttcttggccc

SEQ ID NO: 18166 - DNA, 26 bp, Homo sapiens
agcaattcaaaacttttcttggcccc

SEQ ID NO: 18167 - DNA, 26 bp, Homo sapiens
gcaattcaaaacttttcttggcccca

SEQ ID NO: 18168 - DNA, 26 bp, Homo sapiens
caattcaaaacttttcttggccccag

SEQ ID NO: 18169 - DNA, 26 bp, Homo sapiens
aattcaaaacttttcttggccccaga

SEQ ID NO: 18170 - DNA, 26 bp, Homo sapiens
attcaaaacttttcttggccccagaa

SEQ ID NO: 18171 - DNA, 26 bp, Homo sapiens
ttcaaaacttttcttggccccagaac

SEQ ID NO: 18172 - DNA, 26 bp, Homo sapiens
tcaaaacttttcttggccccagaact

SEQ ID NO: 18173 - DNA, 26 bp, Homo sapiens
caaaacttttcttggccccagaactc

SEQ ID NO: 18174 - DNA, 26 bp, Homo sapiens
aaaacttttcttggccccagaactca

SEQ ID NO: 18175 - DNA, 26 bp, Homo sapiens
aaacttttcttggccccagaactcac

SEQ ID NO: 18176 - DNA, 26 bp, Homo sapiens
aacttttcttggccccagaactcaca

SEQ ID NO: 18177 - DNA, 26 bp, Homo sapiens
acttttcttggccccagaactcacag

SEQ ID NO: 18178 - DNA, 26 bp, Homo sapiens
cttttcttggccccagaactcacagt

SEQ ID NO: 18179 - DNA, 26 bp, Homo sapiens
ttttcttggccccagaactcacagtc

SEQ ID NO: 18180 - DNA, 26 bp, Homo sapiens
tttcttggccccagaactcacagtct

SEQ ID NO: 18181 - DNA, 26 bp, Homo sapiens
ttcttggccccagaactcacagtctt

SEQ ID NO: 18182 - DNA, 26 bp, Homo sapiens
tcttggccccagaactcacagtcttt

SEQ ID NO: 18183 - DNA, 26 bp, Homo sapiens
cttggccccagaactcacagtcttta

SEQ ID NO: 18184 - DNA, 26 bp, Homo sapiens
ttggccccagaactcacagtctttaa

SEQ ID NO: 18185 - DNA, 26 bp, Homo sapiens
tggccccagaactcacagtctttaag

SEQ ID NO: 18186 - DNA, 26 bp, Homo sapiens
ggccccagaactcacagtctttaagc

SEQ ID NO: 18187 - DNA, 26 bp, Homo sapiens
gccccagaactcacagtctttaagct

SEQ ID NO: 18188 - DNA, 26 bp, Homo sapiens
ccccagaactcacagtctttaagctt

SEQ ID NO: 18189 - DNA, 26 bp, Homo sapiens
cccagaactcacagtctttaagcttt

SEQ ID NO: 18190 - DNA, 26 bp, Homo sapiens
ccagaactcacagtctttaagctttt

SEQ ID NO: 18191 - DNA, 26 bp, Homo sapiens
cagaactcacagtctttaagcttttg

SEQ ID NO: 18192 - DNA, 26 bp, Homo sapiens
agaactcacagtctttaagcttttgt

SEQ ID NO: 18193 - DNA, 26 bp, Homo sapiens
gaactcacagtctttaagcttttgtc

SEQ ID NO: 18194 - DNA, 26 bp, Homo sapiens
aactcacagtctttaagcttttgtct

SEQ ID NO: 18195 - DNA, 26 bp, Homo sapiens
actcacagtctttaagcttttgtctt

SEQ ID NO: 18196 - DNA, 26 bp, Homo sapiens
ctcacagtctttaagcttttgtcttt

SEQ ID NO: 18197 - DNA, 26 bp, Homo sapiens
tcacagtctttaagcttttgtctttg

SEQ ID NO: 18198 - DNA, 26 bp, Homo sapiens
cacagtctttaagcttttgtctttgg

SEQ ID NO: 18199 - DNA, 26 bp, Homo sapiens
acagtctttaagcttttgtctttggt

SEQ ID NO: 18200 - DNA, 26 bp, Homo sapiens
cagtctttaagcttttgtctttggtg

SEQ ID NO: 18201 - DNA, 26 bp, Homo sapiens
agtctttaagcttttgtctttggtgt

SEQ ID NO: 18202 - DNA, 26 bp, Homo sapiens
gtctttaagcttttgtctttggtgtc

SEQ ID NO: 18203 - DNA, 26 bp, Homo sapiens
tctttaagcttttgtctttggtgtct

SEQ ID NO: 18204 - DNA, 26 bp, Homo sapiens
ctttaagcttttgtctttggtgtcta

SEQ ID NO: 18205 - DNA, 26 bp, Homo sapiens
tttaagcttttgtctttggtgtctat

SEQ ID NO: 18206 - DNA, 26 bp, Homo sapiens
ttaagcttttgtctttggtgtctatg

SEQ ID NO: 18207 - DNA, 26 bp, Homo sapiens
taagcttttgtctttggtgtctatgc

SEQ ID NO: 18208 - DNA, 26 bp, Homo sapiens
aagcttttgtctttggtgtctatgcc

SEQ ID NO: 18209 - DNA, 26 bp, Homo sapiens
agcttttgtctttggtgtctatgcct

SEQ ID NO: 18210 - DNA, 26 bp, Homo sapiens
gcttttgtctttggtgtctatgcctg

SEQ ID NO: 18211 - DNA, 26 bp, Homo sapiens
cttttgtctttggtgtctatgcctgt

SEQ ID NO: 18212 - DNA, 26 bp, Homo sapiens
ttttgtctttggtgtctatgcctgtg

SEQ ID NO: 18213 - DNA, 26 bp, Homo sapiens
tttgtctttggtgtctatgcctgtga

SEQ ID NO: 18214 - DNA, 26 bp, Homo sapiens
ttgtctttggtgtctatgcctgtgac

SEQ ID NO: 18215 - DNA, 26 bp, Homo sapiens
tgtctttggtgtctatgcctgtgaca

SEQ ID NO: 18216 - DNA, 26 bp, Homo sapiens
gtctttggtgtctatgcctgtgacac

SEQ ID NO: 18217 - DNA, 26 bp, Homo sapiens
tctttggtgtctatgcctgtgacact

SEQ ID NO: 18218 - DNA, 26 bp, Homo sapiens
ctttggtgtctatgcctgtgacactg

SEQ ID NO: 18219 - DNA, 26 bp, Homo sapiens
tttggtgtctatgcctgtgacactgt

SEQ ID NO: 18220 - DNA, 26 bp, Homo sapiens
ttggtgtctatgcctgtgacactgtg

SEQ ID NO: 18221 - DNA, 26 bp, Homo sapiens
tggtgtctatgcctgtgacactgtga

SEQ ID NO: 18222 - DNA, 26 bp, Homo sapiens
ggtgtctatgcctgtgacactgtgaa

SEQ ID NO: 18223 - DNA, 26 bp, Homo sapiens
gtgtctatgcctgtgacactgtgaag

SEQ ID NO: 18224 - DNA, 26 bp, Homo sapiens
tgtctatgcctgtgacactgtgaagc

SEQ ID NO: 18225 - DNA, 26 bp, Homo sapiens
gtctatgcctgtgacactgtgaagct

SEQ ID NO: 18226 - DNA, 26 bp, Homo sapiens
tctatgcctgtgacactgtgaagctt

SEQ ID NO: 18227 - DNA, 26 bp, Homo sapiens
ctatgcctgtgacactgtgaagcttt

SEQ ID NO: 18228 - DNA, 26 bp, Homo sapiens
tatgcctgtgacactgtgaagctttg

SEQ ID NO: 18229 - DNA, 26 bp, Homo sapiens
atgcctgtgacactgtgaagctttga

SEQ ID NO: 18230 - DNA, 26 bp, Homo sapiens
tgcctgtgacactgtgaagctttgac

SEQ ID NO: 18231 - DNA, 26 bp, Homo sapiens
gcctgtgacactgtgaagctttgacg

SEQ ID NO: 18232 - DNA, 26 bp, Homo sapiens
cctgtgacactgtgaagctttgacgg

SEQ ID NO: 18233 - DNA, 26 bp, Homo sapiens
ctgtgacactgtgaagctttgacggc

SEQ ID NO: 18234 - DNA, 26 bp, Homo sapiens
tgtgacactgtgaagctttgacggcg

SEQ ID NO: 18235 - DNA, 26 bp, Homo sapiens
gtgacactgtgaagctttgacggcgc

SEQ ID NO: 18236 - DNA, 26 bp, Homo sapiens
tgacactgtgaagctttgacggcgct

SEQ ID NO: 18237 - DNA, 26 bp, Homo sapiens
gacactgtgaagctttgacggcgctg

SEQ ID NO: 18238 - DNA, 26 bp, Homo sapiens
acactgtgaagctttgacggcgctga

SEQ ID NO: 18239 - DNA, 26 bp, Homo sapiens
cactgtgaagctttgacggcgctgat

SEQ ID NO: 18240 - DNA, 26 bp, Homo sapiens
actgtgaagctttgacggcgctgatg

SEQ ID NO: 18241 - DNA, 26 bp, Homo sapiens
ctgtgaagctttgacggcgctgatgg

SEQ ID NO: 18242 - DNA, 26 bp, Homo sapiens
tgtgaagctttgacggcgctgatggt

SEQ ID NO: 18243 - DNA, 26 bp, Homo sapiens
gtgaagctttgacggcgctgatggtt

SEQ ID NO: 18244 - DNA, 26 bp, Homo sapiens
tgaagctttgacggcgctgatggttc

SEQ ID NO: 18245 - DNA, 26 bp, Homo sapiens
gaagctttgacggcgctgatggttct

SEQ ID NO: 18246 - DNA, 26 bp, Homo sapiens
aagctttgacggcgctgatggttcta

SEQ ID NO: 18247 - DNA, 26 bp, Homo sapiens
agctttgacggcgctgatggttctag

SEQ ID NO: 18248 - DNA, 26 bp, Homo sapiens
gctttgacggcgctgatggttctagg

SEQ ID NO: 18249 - DNA, 26 bp, Homo sapiens
ctttgacggcgctgatggttctaggg

SEQ ID NO: 18250 - DNA, 26 bp, Homo sapiens
tttgacggcgctgatggttctagggg

SEQ ID NO: 18251 - DNA, 26 bp, Homo sapiens
ttgacggcgctgatggttctaggggg

SEQ ID NO: 18252 - DNA, 26 bp, Homo sapiens
tgacggcgctgatggttctaggggga

SEQ ID NO: 18253 - DNA, 26 bp, Homo sapiens
gacggcgctgatggttctagggggaa

SEQ ID NO: 18254 - DNA, 26 bp, Homo sapiens
acggcgctgatggttctagggggaag

SEQ ID NO: 18255 - DNA, 26 bp, Homo sapiens
cggcgctgatggttctagggggaaga

SEQ ID NO: 18256 - DNA, 26 bp, Homo sapiens
ggcgctgatggttctagggggaagaa

SEQ ID NO: 18257 - DNA, 26 bp, Homo sapiens
gcgctgatggttctagggggaagaac

SEQ ID NO: 18258 - DNA, 26 bp, Homo sapiens
cgctgatggttctagggggaagaaca

SEQ ID NO: 18259 - DNA, 26 bp, Homo sapiens
gctgatggttctagggggaagaacat

SEQ ID NO: 18260 - DNA, 26 bp, Homo sapiens
ctgatggttctagggggaagaacatg

SEQ ID NO: 18261 - DNA, 26 bp, Homo sapiens
tgatggttctagggggaagaacatgg

SEQ ID NO: 18262 - DNA, 26 bp, Homo sapiens
gatggttctagggggaagaacatggg

SEQ ID NO: 18263 - DNA, 26 bp, Homo sapiens
atggttctagggggaagaacatggga

SEQ ID NO: 18264 - DNA, 26 bp, Homo sapiens
tggttctagggggaagaacatgggag

SEQ ID NO: 18265 - DNA, 26 bp, Homo sapiens
ggttctagggggaagaacatgggagt

SEQ ID NO: 18266 - DNA, 26 bp, Homo sapiens
gttctagggggaagaacatgggagtg

SEQ ID NO: 18267 - DNA, 26 bp, Homo sapiens
ttctagggggaagaacatgggagtgg

SEQ ID NO: 18268 - DNA, 26 bp, Homo sapiens
tctagggggaagaacatgggagtggg

SEQ ID NO: 18269 - DNA, 26 bp, Homo sapiens
ctagggggaagaacatgggagtgggg

SEQ ID NO: 18270 - DNA, 26 bp, Homo sapiens
tagggggaagaacatgggagtggggc

SEQ ID NO: 18271 - DNA, 26 bp, Homo sapiens
agggggaagaacatgggagtggggct

SEQ ID NO: 18272 - DNA, 26 bp, Homo sapiens
gggggaagaacatgggagtggggctg

SEQ ID NO: 18273 - DNA, 26 bp, Homo sapiens
ggggaagaacatgggagtggggctga

SEQ ID NO: 18274 - DNA, 26 bp, Homo sapiens
gggaagaacatgggagtggggctgag

SEQ ID NO: 18275 - DNA, 26 bp, Homo sapiens
ggaagaacatgggagtggggctgagg

SEQ ID NO: 18276 - DNA, 26 bp, Homo sapiens
gaagaacatgggagtggggctgaggg

SEQ ID NO: 18277 - DNA, 26 bp, Homo sapiens
aagaacatgggagtggggctgagggg

SEQ ID NO: 18278 - DNA, 26 bp, Homo sapiens
agaacatgggagtggggctgaggggc

SEQ ID NO: 18279 - DNA, 26 bp, Homo sapiens
gaacatgggagtggggctgaggggcg

SEQ ID NO: 18280 - DNA, 26 bp, Homo sapiens
aacatgggagtggggctgaggggcgt

SEQ ID NO: 18281 - DNA, 26 bp, Homo sapiens
acatgggagtggggctgaggggcgtc

SEQ ID NO: 18282 - DNA, 26 bp, Homo sapiens
catgggagtggggctgaggggcgtct

SEQ ID NO: 18283 - DNA, 26 bp, Homo sapiens
atgggagtggggctgaggggcgtctg

SEQ ID NO: 18284 - DNA, 26 bp, Homo sapiens
tgggagtggggctgaggggcgtctgt

SEQ ID NO: 18285 - DNA, 26 bp, Homo sapiens
gggagtggggctgaggggcgtctgtg

SEQ ID NO: 18286 - DNA, 26 bp, Homo sapiens
ggagtggggctgaggggcgtctgtgg

SEQ ID NO: 18287 - DNA, 26 bp, Homo sapiens
gagtggggctgaggggcgtctgtggg

SEQ ID NO: 18288 - DNA, 26 bp, Homo sapiens
agtggggctgaggggcgtctgtgggg

SEQ ID NO: 18289 - DNA, 26 bp, Homo sapiens
gtggggctgaggggcgtctgtggggc

SEQ ID NO: 18290 - DNA, 26 bp, Homo sapiens
tggggctgaggggcgtctgtggggca

SEQ ID NO: 18291 - DNA, 26 bp, Homo sapiens
ggggctgaggggcgtctgtggggcac

SEQ ID NO: 18292 - DNA, 26 bp, Homo sapiens
gggctgaggggcgtctgtggggcact

SEQ ID NO: 18293 - DNA, 26 bp, Homo sapiens
ggctgaggggcgtctgtggggcactg

SEQ ID NO: 18294 - DNA, 26 bp, Homo sapiens
gctgaggggcgtctgtggggcactgt

SEQ ID NO: 18295 - DNA, 26 bp, Homo sapiens
ctgaggggcgtctgtggggcactgta

SEQ ID NO: 18296 - DNA, 26 bp, Homo sapiens
tgaggggcgtctgtggggcactgtag

SEQ ID NO: 18297 - DNA, 26 bp, Homo sapiens
gaggggcgtctgtggggcactgtagt

SEQ ID NO: 18298 - DNA, 26 bp, Homo sapiens
aggggcgtctgtggggcactgtagta

SEQ ID NO: 18299 - DNA, 26 bp, Homo sapiens
ggggcgtctgtggggcactgtagtag

SEQ ID NO: 18300 - DNA, 26 bp, Homo sapiens
gggcgtctgtggggcactgtagtagc

SEQ ID NO: 18301 - DNA, 26 bp, Homo sapiens
ggcgtctgtggggcactgtagtagcc

SEQ ID NO: 18302 - DNA, 26 bp, Homo sapiens
gcgtctgtggggcactgtagtagcct

SEQ ID NO: 18303 - DNA, 26 bp, Homo sapiens
cgtctgtggggcactgtagtagcctg

SEQ ID NO: 18304 - DNA, 26 bp, Homo sapiens
gtctgtggggcactgtagtagcctgg

SEQ ID NO: 18305 - DNA, 26 bp, Homo sapiens
tctgtggggcactgtagtagcctggc

SEQ ID NO: 18306 - DNA, 26 bp, Homo sapiens
ctgtggggcactgtagtagcctggcc

SEQ ID NO: 18307 - DNA, 26 bp, Homo sapiens
tgtggggcactgtagtagcctggcct

SEQ ID NO: 18308 - DNA, 26 bp, Homo sapiens
gtggggcactgtagtagcctggcctc

SEQ ID NO: 18309 - DNA, 26 bp, Homo sapiens
tggggcactgtagtagcctggcctct

SEQ ID NO: 18310 - DNA, 26 bp, Homo sapiens
ggggcactgtagtagcctggcctctg

SEQ ID NO: 18311 - DNA, 26 bp, Homo sapiens
gggcactgtagtagcctggcctctga

SEQ ID NO: 18312 - DNA, 26 bp, Homo sapiens
ggcactgtagtagcctggcctctgat

SEQ ID NO: 18313 - DNA, 26 bp, Homo sapiens
gcactgtagtagcctggcctctgata

SEQ ID NO: 18314 - DNA, 26 bp, Homo sapiens
cactgtagtagcctggcctctgatac

SEQ ID NO: 18315 - DNA, 26 bp, Homo sapiens
actgtagtagcctggcctctgataca

SEQ ID NO: 18316 - DNA, 26 bp, Homo sapiens
ctgtagtagcctggcctctgatacag

SEQ ID NO: 18317 - DNA, 26 bp, Homo sapiens
tgtagtagcctggcctctgatacagt

SEQ ID NO: 18318 - DNA, 26 bp, Homo sapiens
gtagtagcctggcctctgatacagtg

SEQ ID NO: 18319 - DNA, 26 bp, Homo sapiens
tagtagcctggcctctgatacagtgg

SEQ ID NO: 18320 - DNA, 26 bp, Homo sapiens
agtagcctggcctctgatacagtggg

SEQ ID NO: 18321 - DNA, 26 bp, Homo sapiens
gtagcctggcctctgatacagtgggg

SEQ ID NO: 18322 - DNA, 26 bp, Homo sapiens
tagcctggcctctgatacagtggggc

SEQ ID NO: 18323 - DNA, 26 bp, Homo sapiens
agcctggcctctgatacagtggggca

SEQ ID NO: 18324 - DNA, 26 bp, Homo sapiens
gcctggcctctgatacagtggggcag

SEQ ID NO: 18325 - DNA, 26 bp, Homo sapiens
cctggcctctgatacagtggggcaga

SEQ ID NO: 18326 - DNA, 26 bp, Homo sapiens
ctggcctctgatacagtggggcagac

SEQ ID NO: 18327 - DNA, 26 bp, Homo sapiens
tggcctctgatacagtggggcagact

SEQ ID NO: 18328 - DNA, 26 bp, Homo sapiens
ggcctctgatacagtggggcagactt

SEQ ID NO: 18329 - DNA, 26 bp, Homo sapiens
gcctctgatacagtggggcagacttg

SEQ ID NO: 18330 - DNA, 26 bp, Homo sapiens
cctctgatacagtggggcagacttga

SEQ ID NO: 18331 - DNA, 26 bp, Homo sapiens
ctctgatacagtggggcagacttgaa

SEQ ID NO: 18332 - DNA, 26 bp, Homo sapiens
tctgatacagtggggcagacttgaag

SEQ ID NO: 18333 - DNA, 26 bp, Homo sapiens
ctgatacagtggggcagacttgaagg

SEQ ID NO: 18334 - DNA, 26 bp, Homo sapiens
tgatacagtggggcagacttgaaggc

SEQ ID NO: 18335 - DNA, 26 bp, Homo sapiens
gatacagtggggcagacttgaaggcg

SEQ ID NO: 18336 - DNA, 26 bp, Homo sapiens
atacagtggggcagacttgaaggcgt

SEQ ID NO: 18337 - DNA, 26 bp, Homo sapiens
tacagtggggcagacttgaaggcgtc

SEQ ID NO: 18338 - DNA, 26 bp, Homo sapiens
acagtggggcagacttgaaggcgtcc

SEQ ID NO: 18339 - DNA, 26 bp, Homo sapiens
cagtggggcagacttgaaggcgtcca

SEQ ID NO: 18340 - DNA, 26 bp, Homo sapiens
agtggggcagacttgaaggcgtccac

SEQ ID NO: 18341 - DNA, 26 bp, Homo sapiens
gtggggcagacttgaaggcgtccaca

SEQ ID NO: 18342 - DNA, 26 bp, Homo sapiens
tggggcagacttgaaggcgtccacag

SEQ ID NO: 18343 - DNA, 26 bp, Homo sapiens
ggggcagacttgaaggcgtccacagc

SEQ ID NO: 18344 - DNA, 26 bp, Homo sapiens
gggcagacttgaaggcgtccacagcc

SEQ ID NO: 18345 - DNA, 26 bp, Homo sapiens
ggcagacttgaaggcgtccacagcct

SEQ ID NO: 18346 - DNA, 26 bp, Homo sapiens
gcagacttgaaggcgtccacagcctt

SEQ ID NO: 18347 - DNA, 26 bp, Homo sapiens
cagacttgaaggcgtccacagcctta

SEQ ID NO: 18348 - DNA, 26 bp, Homo sapiens
agacttgaaggcgtccacagccttaa

SEQ ID NO: 18349 - DNA, 26 bp, Homo sapiens
gacttgaaggcgtccacagccttaag

SEQ ID NO: 18350 - DNA, 26 bp, Homo sapiens
acttgaaggcgtccacagccttaagc

SEQ ID NO: 18351 - DNA, 26 bp, Homo sapiens
cttgaaggcgtccacagccttaagct

SEQ ID NO: 18352 - DNA, 26 bp, Homo sapiens
ttgaaggcgtccacagccttaagctt

SEQ ID NO: 18353 - DNA, 26 bp, Homo sapiens
tgaaggcgtccacagccttaagcttc

SEQ ID NO: 18354 - DNA, 26 bp, Homo sapiens
gaaggcgtccacagccttaagcttcc

SEQ ID NO: 18355 - DNA, 26 bp, Homo sapiens
aaggcgtccacagccttaagcttcca

SEQ ID NO: 18356 - DNA, 26 bp, Homo sapiens
aggcgtccacagccttaagcttccag

SEQ ID NO: 18357 - DNA, 26 bp, Homo sapiens
ggcgtccacagccttaagcttccagg

SEQ ID NO: 18358 - DNA, 26 bp, Homo sapiens
gcgtccacagccttaagcttccaggc

SEQ ID NO: 18359 - DNA, 26 bp, Homo sapiens
cgtccacagccttaagcttccaggcc

SEQ ID NO: 18360 - DNA, 26 bp, Homo sapiens
gtccacagccttaagcttccaggcct

SEQ ID NO: 18361 - DNA, 26 bp, Homo sapiens
tccacagccttaagcttccaggcctt

SEQ ID NO: 18362 - DNA, 26 bp, Homo sapiens
ccacagccttaagcttccaggccttg

SEQ ID NO: 18363 - DNA, 26 bp, Homo sapiens
cacagccttaagcttccaggccttgt

SEQ ID NO: 18364 - DNA, 26 bp, Homo sapiens
acagccttaagcttccaggccttgtt

SEQ ID NO: 18365 - DNA, 26 bp, Homo sapiens
cagccttaagcttccaggccttgttg

SEQ ID NO: 18366 - DNA, 26 bp, Homo sapiens
agccttaagcttccaggccttgttgt

SEQ ID NO: 18367 - DNA, 26 bp, Homo sapiens
gccttaagcttccaggccttgttgtc

SEQ ID NO: 18368 - DNA, 26 bp, Homo sapiens
ccttaagcttccaggccttgttgtct

SEQ ID NO: 18369 - DNA, 26 bp, Homo sapiens
cttaagcttccaggccttgttgtctt

SEQ ID NO: 18370 - DNA, 26 bp, Homo sapiens
ttaagcttccaggccttgttgtcttc

SEQ ID NO: 18371 - DNA, 26 bp, Homo sapiens
taagcttccaggccttgttgtcttcc

SEQ ID NO: 18372 - DNA, 26 bp, Homo sapiens
aagcttccaggccttgttgtcttcct

SEQ ID NO: 18373 - DNA, 26 bp, Homo sapiens
agcttccaggccttgttgtcttcctg

SEQ ID NO: 18374 - DNA, 26 bp, Homo sapiens
gcttccaggccttgttgtcttcctgg

SEQ ID NO: 18375 - DNA, 26 bp, Homo sapiens
cttccaggccttgttgtcttcctggc

SEQ ID NO: 18376 - DNA, 26 bp, Homo sapiens
ttccaggccttgttgtcttcctggcc

SEQ ID NO: 18377 - DNA, 26 bp, Homo sapiens
tccaggccttgttgtcttcctggccc

SEQ ID NO: 18378 - DNA, 26 bp, Homo sapiens
ccaggccttgttgtcttcctggcccc

SEQ ID NO: 18379 - DNA, 26 bp, Homo sapiens
caggccttgttgtcttcctggcccct

SEQ ID NO: 18380 - DNA, 26 bp, Homo sapiens
aggccttgttgtcttcctggccccta

SEQ ID NO: 18381 - DNA, 26 bp, Homo sapiens
ggccttgttgtcttcctggcccctaa

SEQ ID NO: 18382 - DNA, 26 bp, Homo sapiens
gccttgttgtcttcctggcccctaac

SEQ ID NO: 18383 - DNA, 26 bp, Homo sapiens
ccttgttgtcttcctggcccctaacg

SEQ ID NO: 18384 - DNA, 26 bp, Homo sapiens
cttgttgtcttcctggcccctaacgt

SEQ ID NO: 18385 - DNA, 26 bp, Homo sapiens
ttgttgtcttcctggcccctaacgtt

SEQ ID NO: 18386 - DNA, 26 bp, Homo sapiens
tgttgtcttcctggcccctaacgttc

SEQ ID NO: 18387 - DNA, 26 bp, Homo sapiens
gttgtcttcctggcccctaacgttct

SEQ ID NO: 18388 - DNA, 26 bp, Homo sapiens
ttgtcttcctggcccctaacgttctg

SEQ ID NO: 18389 - DNA, 26 bp, Homo sapiens
tgtcttcctggcccctaacgttctgt

SEQ ID NO: 18390 - DNA, 26 bp, Homo sapiens
gtcttcctggcccctaacgttctgtt

SEQ ID NO: 18391 - DNA, 26 bp, Homo sapiens
tcttcctggcccctaacgttctgttt

SEQ ID NO: 18392 - DNA, 26 bp, Homo sapiens
cttcctggcccctaacgttctgtttg

SEQ ID NO: 18393 - DNA, 26 bp, Homo sapiens
ttcctggcccctaacgttctgtttgg

SEQ ID NO: 18394 - DNA, 26 bp, Homo sapiens
tcctggcccctaacgttctgtttggc

SEQ ID NO: 18395 - DNA, 26 bp, Homo sapiens
cctggcccctaacgttctgtttggct

SEQ ID NO: 18396 - DNA, 26 bp, Homo sapiens
ctggcccctaacgttctgtttggctg

SEQ ID NO: 18397 - DNA, 26 bp, Homo sapiens
tggcccctaacgttctgtttggctgc

SEQ ID NO: 18398 - DNA, 26 bp, Homo sapiens
ggcccctaacgttctgtttggctgcc

SEQ ID NO: 18399 - DNA, 26 bp, Homo sapiens
gcccctaacgttctgtttggctgcct

SEQ ID NO: 18400 - DNA, 26 bp, Homo sapiens
cccctaacgttctgtttggctgcctt

SEQ ID NO: 18401 - DNA, 26 bp, Homo sapiens
ccctaacgttctgtttggctgccttg

SEQ ID NO: 18402 - DNA, 26 bp, Homo sapiens
cctaacgttctgtttggctgccttgt

SEQ ID NO: 18403 - DNA, 26 bp, Homo sapiens
ctaacgttctgtttggctgccttgtg

SEQ ID NO: 18404 - DNA, 26 bp, Homo sapiens
taacgttctgtttggctgccttgtgg

SEQ ID NO: 18405 - DNA, 26 bp, Homo sapiens
aacgttctgtttggctgccttgtggt

SEQ ID NO: 18406 - DNA, 26 bp, Homo sapiens
acgttctgtttggctgccttgtggtt

SEQ ID NO: 18407 - DNA, 26 bp, Homo sapiens
cgttctgtttggctgccttgtggttt

SEQ ID NO: 18408 - DNA, 26 bp, Homo sapiens
gttctgtttggctgccttgtggtttt

SEQ ID NO: 18409 - DNA, 26 bp, Homo sapiens
ttctgtttggctgccttgtggttttt

SEQ ID NO: 18410 - DNA, 26 bp, Homo sapiens
tctgtttggctgccttgtggtttttg

SEQ ID NO: 18411 - DNA, 26 bp, Homo sapiens
ctgtttggctgccttgtggtttttgg

SEQ ID NO: 18412 - DNA, 26 bp, Homo sapiens
tgtttggctgccttgtggtttttggg

SEQ ID NO: 18413 - DNA, 26 bp, Homo sapiens
gtttggctgccttgtggtttttgggc

SEQ ID NO: 18414 - DNA, 26 bp, Homo sapiens
tttggctgccttgtggtttttgggca

SEQ ID NO: 18415 - DNA, 26 bp, Homo sapiens
ttggctgccttgtggtttttgggcag

SEQ ID NO: 18416 - DNA, 26 bp, Homo sapiens
tggctgccttgtggtttttgggcagg

SEQ ID NO: 18417 - DNA, 26 bp, Homo sapiens
ggctgccttgtggtttttgggcaggc

SEQ ID NO: 18418 - DNA, 26 bp, Homo sapiens
gctgccttgtggtttttgggcaggcc

SEQ ID NO: 18419 - DNA, 26 bp, Homo sapiens
ctgccttgtggtttttgggcaggccc

SEQ ID NO: 18420 - DNA, 26 bp, Homo sapiens
tgccttgtggtttttgggcaggccct

SEQ ID NO: 18421 - DNA, 26 bp, Homo sapiens
gccttgtggtttttgggcaggccctc

SEQ ID NO: 18422 - DNA, 26 bp, Homo sapiens
ccttgtggtttttgggcaggccctcg

SEQ ID NO: 18423 - DNA, 26 bp, Homo sapiens
cttgtggtttttgggcaggccctcgt

SEQ ID NO: 18424 - DNA, 26 bp, Homo sapiens
ttgtggtttttgggcaggccctcgtg

SEQ ID NO: 18425 - DNA, 26 bp, Homo sapiens
tgtggtttttgggcaggccctcgtgg

SEQ ID NO: 18426 - DNA, 26 bp, Homo sapiens
gtggtttttgggcaggccctcgtgga

SEQ ID NO: 18427 - DNA, 26 bp, Homo sapiens
tggtttttgggcaggccctcgtggag

SEQ ID NO: 18428 - DNA, 26 bp, Homo sapiens
ggtttttgggcaggccctcgtggaga

SEQ ID NO: 18429 - DNA, 26 bp, Homo sapiens
gtttttgggcaggccctcgtggagaa

SEQ ID NO: 18430 - DNA, 26 bp, Homo sapiens
tttttgggcaggccctcgtggagaag

SEQ ID NO: 18431 - DNA, 26 bp, Homo sapiens
ttttgggcaggccctcgtggagaagg

SEQ ID NO: 18432 - DNA, 26 bp, Homo sapiens
tttgggcaggccctcgtggagaaggg

SEQ ID NO: 18433 - DNA, 26 bp, Homo sapiens
ttgggcaggccctcgtggagaaggga

SEQ ID NO: 18434 - DNA, 26 bp, Homo sapiens
tgggcaggccctcgtggagaagggat

SEQ ID NO: 18435 - DNA, 26 bp, Homo sapiens
gggcaggccctcgtggagaagggatt

SEQ ID NO: 18436 - DNA, 26 bp, Homo sapiens
ggcaggccctcgtggagaagggattc

SEQ ID NO: 18437 - DNA, 26 bp, Homo sapiens
gcaggccctcgtggagaagggattcc

SEQ ID NO: 18438 - DNA, 26 bp, Homo sapiens
caggccctcgtggagaagggattccc

SEQ ID NO: 18439 - DNA, 26 bp, Homo sapiens
aggccctcgtggagaagggattccct

SEQ ID NO: 18440 - DNA, 26 bp, Homo sapiens
ggccctcgtggagaagggattccctc

SEQ ID NO: 18441 - DNA, 26 bp, Homo sapiens
gccctcgtggagaagggattccctct

SEQ ID NO: 18442 - DNA, 26 bp, Homo sapiens
ccctcgtggagaagggattccctctt

SEQ ID NO: 18443 - DNA, 26 bp, Homo sapiens
cctcgtggagaagggattccctcttg

SEQ ID NO: 18444 - DNA, 26 bp, Homo sapiens
ctcgtggagaagggattccctcttgg

SEQ ID NO: 18445 - DNA, 26 bp, Homo sapiens
tcgtggagaagggattccctcttggg

SEQ ID NO: 18446 - DNA, 26 bp, Homo sapiens
cgtggagaagggattccctcttgggc

SEQ ID NO: 18447 - DNA, 26 bp, Homo sapiens
gtggagaagggattccctcttgggcc

SEQ ID NO: 18448 - DNA, 26 bp, Homo sapiens
tggagaagggattccctcttgggcca

SEQ ID NO: 18449 - DNA, 26 bp, Homo sapiens
ggagaagggattccctcttgggccac

SEQ ID NO: 18450 - DNA, 26 bp, Homo sapiens
gagaagggattccctcttgggccaca

SEQ ID NO: 18451 - DNA, 26 bp, Homo sapiens
agaagggattccctcttgggccacag

SEQ ID NO: 18452 - DNA, 26 bp, Homo sapiens
gaagggattccctcttgggccacagt

SEQ ID NO: 18453 - DNA, 26 bp, Homo sapiens
aagggattccctcttgggccacagta

SEQ ID NO: 18454 - DNA, 26 bp, Homo sapiens
agggattccctcttgggccacagtag

SEQ ID NO: 18455 - DNA, 26 bp, Homo sapiens
gggattccctcttgggccacagtagt

SEQ ID NO: 18456 - DNA, 26 bp, Homo sapiens
ggattccctcttgggccacagtagtt

SEQ ID NO: 18457 - DNA, 26 bp, Homo sapiens
gattccctcttgggccacagtagttt

SEQ ID NO: 18458 - DNA, 26 bp, Homo sapiens
attccctcttgggccacagtagtttg

SEQ ID NO: 18459 - DNA, 26 bp, Homo sapiens
ttccctcttgggccacagtagtttgg

SEQ ID NO: 18460 - DNA, 26 bp, Homo sapiens
tccctcttgggccacagtagtttggt

SEQ ID NO: 18461 - DNA, 26 bp, Homo sapiens
ccctcttgggccacagtagtttggtc

SEQ ID NO: 18462 - DNA, 26 bp, Homo sapiens
cctcttgggccacagtagtttggtcc

SEQ ID NO: 18463 - DNA, 26 bp, Homo sapiens
ctcttgggccacagtagtttggtcct

SEQ ID NO: 18464 - DNA, 26 bp, Homo sapiens
tcttgggccacagtagtttggtcctt

SEQ ID NO: 18465 - DNA, 26 bp, Homo sapiens
cttgggccacagtagtttggtccttg

SEQ ID NO: 18466 - DNA, 26 bp, Homo sapiens
ttgggccacagtagtttggtccttga

SEQ ID NO: 18467 - DNA, 26 bp, Homo sapiens
tgggccacagtagtttggtccttgag

SEQ ID NO: 18468 - DNA, 26 bp, Homo sapiens
gggccacagtagtttggtccttgagt

SEQ ID NO: 18469 - DNA, 26 bp, Homo sapiens
ggccacagtagtttggtccttgagtt

SEQ ID NO: 18470 - DNA, 26 bp, Homo sapiens
gccacagtagtttggtccttgagttt

SEQ ID NO: 18471 - DNA, 26 bp, Homo sapiens
ccacagtagtttggtccttgagtttg

SEQ ID NO: 18472 - DNA, 26 bp, Homo sapiens
cacagtagtttggtccttgagtttgc

SEQ ID NO: 18473 - DNA, 26 bp, Homo sapiens
acagtagtttggtccttgagtttgcc

SEQ ID NO: 18474 - DNA, 26 bp, Homo sapiens
cagtagtttggtccttgagtttgccc

SEQ ID NO: 18475 - DNA, 26 bp, Homo sapiens
agtagtttggtccttgagtttgccct

SEQ ID NO: 18476 - DNA, 26 bp, Homo sapiens
gtagtttggtccttgagtttgccctg

SEQ ID NO: 18477 - DNA, 26 bp, Homo sapiens
tagtttggtccttgagtttgccctgg

SEQ ID NO: 18478 - DNA, 26 bp, Homo sapiens
agtttggtccttgagtttgccctggg

SEQ ID NO: 18479 - DNA, 26 bp, Homo sapiens
gtttggtccttgagtttgccctggga

SEQ ID NO: 18480 - DNA, 26 bp, Homo sapiens
tttggtccttgagtttgccctgggag

SEQ ID NO: 18481 - DNA, 26 bp, Homo sapiens
ttggtccttgagtttgccctgggagg

SEQ ID NO: 18482 - DNA, 26 bp, Homo sapiens
tggtccttgagtttgccctgggagga

SEQ ID NO: 18483 - DNA, 26 bp, Homo sapiens
ggtccttgagtttgccctgggaggat

SEQ ID NO: 18484 - DNA, 26 bp, Homo sapiens
gtccttgagtttgccctgggaggatg

SEQ ID NO: 18485 - DNA, 26 bp, Homo sapiens
tccttgagtttgccctgggaggatgg

SEQ ID NO: 18486 - DNA, 26 bp, Homo sapiens
ccttgagtttgccctgggaggatggt

SEQ ID NO: 18487 - DNA, 26 bp, Homo sapiens
cttgagtttgccctgggaggatggtg

SEQ ID NO: 18488 - DNA, 26 bp, Homo sapiens
ttgagtttgccctgggaggatggtga

SEQ ID NO: 18489 - DNA, 26 bp, Homo sapiens
tgagtttgccctgggaggatggtgat

SEQ ID NO: 18490 - DNA, 26 bp, Homo sapiens
gagtttgccctgggaggatggtgatc

SEQ ID NO: 18491 - DNA, 26 bp, Homo sapiens
agtttgccctgggaggatggtgatca

SEQ ID NO: 18492 - DNA, 26 bp, Homo sapiens
gtttgccctgggaggatggtgatcat

SEQ ID NO: 18493 - DNA, 26 bp, Homo sapiens
tttgccctgggaggatggtgatcatg

SEQ ID NO: 18494 - DNA, 26 bp, Homo sapiens
ttgccctgggaggatggtgatcatgg

SEQ ID NO: 18495 - DNA, 26 bp, Homo sapiens
tgccctgggaggatggtgatcatggg

SEQ ID NO: 18496 - DNA, 26 bp, Homo sapiens
gccctgggaggatggtgatcatggga

SEQ ID NO: 18497 - DNA, 26 bp, Homo sapiens
ccctgggaggatggtgatcatgggac

SEQ ID NO: 18498 - DNA, 26 bp, Homo sapiens
cctgggaggatggtgatcatgggact

SEQ ID NO: 18499 - DNA, 26 bp, Homo sapiens
ctgggaggatggtgatcatgggactg

SEQ ID NO: 18500 - DNA, 26 bp, Homo sapiens
tgggaggatggtgatcatgggactgc

SEQ ID NO: 18501 - DNA, 26 bp, Homo sapiens
gggaggatggtgatcatgggactgca

SEQ ID NO: 18502 - DNA, 26 bp, Homo sapiens
ggaggatggtgatcatgggactgcag

SEQ ID NO: 18503 - DNA, 26 bp, Homo sapiens
gaggatggtgatcatgggactgcagg

SEQ ID NO: 18504 - DNA, 26 bp, Homo sapiens
aggatggtgatcatgggactgcaggc

SEQ ID NO: 18505 - DNA, 26 bp, Homo sapiens
ggatggtgatcatgggactgcaggcc

SEQ ID NO: 18506 - DNA, 26 bp, Homo sapiens
gatggtgatcatgggactgcaggcct

SEQ ID NO: 18507 - DNA, 26 bp, Homo sapiens
atggtgatcatgggactgcaggccta

SEQ ID NO: 18508 - DNA, 26 bp, Homo sapiens
tggtgatcatgggactgcaggcctag

SEQ ID NO: 18509 - DNA, 26 bp, Homo sapiens
ggtgatcatgggactgcaggcctagg

SEQ ID NO: 18510 - DNA, 26 bp, Homo sapiens
gtgatcatgggactgcaggcctagga

SEQ ID NO: 18511 - DNA, 26 bp, Homo sapiens
tgatcatgggactgcaggcctaggaa

SEQ ID NO: 18512 - DNA, 26 bp, Homo sapiens
gatcatgggactgcaggcctaggaag

SEQ ID NO: 18513 - DNA, 26 bp, Homo sapiens
atcatgggactgcaggcctaggaagc

SEQ ID NO: 18514 - DNA, 26 bp, Homo sapiens
tcatgggactgcaggcctaggaagcg

SEQ ID NO: 18515 - DNA, 26 bp, Homo sapiens
catgggactgcaggcctaggaagcgg

SEQ ID NO: 18516 - DNA, 26 bp, Homo sapiens
atgggactgcaggcctaggaagcggc

SEQ ID NO: 18517 - DNA, 26 bp, Homo sapiens
tgggactgcaggcctaggaagcggcc

SEQ ID NO: 18518 - DNA, 26 bp, Homo sapiens
gggactgcaggcctaggaagcggcca

SEQ ID NO: 18519 - DNA, 26 bp, Homo sapiens
ggactgcaggcctaggaagcggccaa

SEQ ID NO: 18520 - DNA, 26 bp, Homo sapiens
gactgcaggcctaggaagcggccaat

SEQ ID NO: 18521 - DNA, 26 bp, Homo sapiens
actgcaggcctaggaagcggccaatg

SEQ ID NO: 18522 - DNA, 26 bp, Homo sapiens
ctgcaggcctaggaagcggccaatga

SEQ ID NO: 18523 - DNA, 26 bp, Homo sapiens
tgcaggcctaggaagcggccaatgat

SEQ ID NO: 18524 - DNA, 26 bp, Homo sapiens
gcaggcctaggaagcggccaatgatg

SEQ ID NO: 18525 - DNA, 26 bp, Homo sapiens
caggcctaggaagcggccaatgatgc

SEQ ID NO: 18526 - DNA, 26 bp, Homo sapiens
aggcctaggaagcggccaatgatgcc

SEQ ID NO: 18527 - DNA, 26 bp, Homo sapiens
ggcctaggaagcggccaatgatgcca

SEQ ID NO: 18528 - DNA, 26 bp, Homo sapiens
gcctaggaagcggccaatgatgccag

SEQ ID NO: 18529 - DNA, 26 bp, Homo sapiens
cctaggaagcggccaatgatgccagc

SEQ ID NO: 18530 - DNA, 26 bp, Homo sapiens
ctaggaagcggccaatgatgccagcg

SEQ ID NO: 18531 - DNA, 26 bp, Homo sapiens
taggaagcggccaatgatgccagcgt

SEQ ID NO: 18532 - DNA, 26 bp, Homo sapiens
aggaagcggccaatgatgccagcgtg

SEQ ID NO: 18533 - DNA, 26 bp, Homo sapiens
ggaagcggccaatgatgccagcgtga

SEQ ID NO: 18534 - DNA, 26 bp, Homo sapiens
gaagcggccaatgatgccagcgtgag

SEQ ID NO: 18535 - DNA, 26 bp, Homo sapiens
aagcggccaatgatgccagcgtgagc

SEQ ID NO: 18536 - DNA, 26 bp, Homo sapiens
agcggccaatgatgccagcgtgagca

SEQ ID NO: 18537 - DNA, 26 bp, Homo sapiens
gcggccaatgatgccagcgtgagcat

SEQ ID NO: 18538 - DNA, 26 bp, Homo sapiens
cggccaatgatgccagcgtgagcatc

SEQ ID NO: 18539 - DNA, 26 bp, Homo sapiens
ggccaatgatgccagcgtgagcatcc

SEQ ID NO: 18540 - DNA, 26 bp, Homo sapiens
gccaatgatgccagcgtgagcatcct

SEQ ID NO: 18541 - DNA, 26 bp, Homo sapiens
ccaatgatgccagcgtgagcatcctc

SEQ ID NO: 18542 - DNA, 26 bp, Homo sapiens
caatgatgccagcgtgagcatcctcc

SEQ ID NO: 18543 - DNA, 26 bp, Homo sapiens
aatgatgccagcgtgagcatcctcct

SEQ ID NO: 18544 - DNA, 26 bp, Homo sapiens
atgatgccagcgtgagcatcctcctc

SEQ ID NO: 18545 - DNA, 26 bp, Homo sapiens
tgatgccagcgtgagcatcctcctcg

SEQ ID NO: 18546 - DNA, 26 bp, Homo sapiens
gatgccagcgtgagcatcctcctcgt

SEQ ID NO: 18547 - DNA, 26 bp, Homo sapiens
atgccagcgtgagcatcctcctcgtc

SEQ ID NO: 18548 - DNA, 26 bp, Homo sapiens
tgccagcgtgagcatcctcctcgtcc

SEQ ID NO: 18549 - DNA, 26 bp, Homo sapiens
gccagcgtgagcatcctcctcgtcct

SEQ ID NO: 18550 - DNA, 26 bp, Homo sapiens
ccagcgtgagcatcctcctcgtcctc

SEQ ID NO: 18551 - DNA, 26 bp, Homo sapiens
cagcgtgagcatcctcctcgtcctcc

SEQ ID NO: 18552 - DNA, 26 bp, Homo sapiens
agcgtgagcatcctcctcgtcctcct

SEQ ID NO: 18553 - DNA, 26 bp, Homo sapiens
gcgtgagcatcctcctcgtcctcctg

SEQ ID NO: 18554 - DNA, 26 bp, Homo sapiens
cgtgagcatcctcctcgtcctcctga

SEQ ID NO: 18555 - DNA, 26 bp, Homo sapiens
gtgagcatcctcctcgtcctcctgat

SEQ ID NO: 18556 - DNA, 26 bp, Homo sapiens
tgagcatcctcctcgtcctcctgatt

SEQ ID NO: 18557 - DNA, 26 bp, Homo sapiens
gagcatcctcctcgtcctcctgattg

SEQ ID NO: 18558 - DNA, 26 bp, Homo sapiens
agcatcctcctcgtcctcctgattgg

SEQ ID NO: 18559 - DNA, 26 bp, Homo sapiens
gcatcctcctcgtcctcctgattggg

SEQ ID NO: 18560 - DNA, 26 bp, Homo sapiens
catcctcctcgtcctcctgattgggc

SEQ ID NO: 18561 - DNA, 26 bp, Homo sapiens
atcctcctcgtcctcctgattgggct

SEQ ID NO: 18562 - DNA, 26 bp, Homo sapiens
tcctcctcgtcctcctgattgggctg

SEQ ID NO: 18563 - DNA, 26 bp, Homo sapiens
cctcctcgtcctcctgattgggctgg

SEQ ID NO: 18564 - DNA, 26 bp, Homo sapiens
ctcctcgtcctcctgattgggctgga

SEQ ID NO: 18565 - DNA, 26 bp, Homo sapiens
tcctcgtcctcctgattgggctggaa

SEQ ID NO: 18566 - DNA, 26 bp, Homo sapiens
cctcgtcctcctgattgggctggaac

SEQ ID NO: 18567 - DNA, 26 bp, Homo sapiens
ctcgtcctcctgattgggctggaact

SEQ ID NO: 18568 - DNA, 26 bp, Homo sapiens
tcgtcctcctgattgggctggaactc

SEQ ID NO: 18569 - DNA, 26 bp, Homo sapiens
cgtcctcctgattgggctggaactcc

SEQ ID NO: 18570 - DNA, 26 bp, Homo sapiens
gtcctcctgattgggctggaactcca

SEQ ID NO: 18571 - DNA, 26 bp, Homo sapiens
tcctcctgattgggctggaactccat

SEQ ID NO: 18572 - DNA, 26 bp, Homo sapiens
cctcctgattgggctggaactccatc

SEQ ID NO: 18573 - DNA, 26 bp, Homo sapiens
ctcctgattgggctggaactccatct

SEQ ID NO: 18574 - DNA, 26 bp, Homo sapiens
tcctgattgggctggaactccatctc

SEQ ID NO: 18575 - DNA, 26 bp, Homo sapiens
cctgattgggctggaactccatctcc

SEQ ID NO: 18576 - DNA, 26 bp, Homo sapiens
ctgattgggctggaactccatctcct

SEQ ID NO: 18577 - DNA, 26 bp, Homo sapiens
tgattgggctggaactccatctcctc

SEQ ID NO: 18578 - DNA, 26 bp, Homo sapiens
gattgggctggaactccatctcctct

SEQ ID NO: 18579 - DNA, 26 bp, Homo sapiens
attgggctggaactccatctcctctt

SEQ ID NO: 18580 - DNA, 26 bp, Homo sapiens
ttgggctggaactccatctcctcttt

SEQ ID NO: 18581 - DNA, 26 bp, Homo sapiens
tgggctggaactccatctcctctttg

SEQ ID NO: 18582 - DNA, 26 bp, Homo sapiens
gggctggaactccatctcctctttgt

SEQ ID NO: 18583 - DNA, 26 bp, Homo sapiens
ggctggaactccatctcctctttgtt

SEQ ID NO: 18584 - DNA, 26 bp, Homo sapiens
gctggaactccatctcctctttgttc

SEQ ID NO: 18585 - DNA, 26 bp, Homo sapiens
ctggaactccatctcctctttgttca

SEQ ID NO: 18586 - DNA, 26 bp, Homo sapiens
tggaactccatctcctctttgttcag

SEQ ID NO: 18587 - DNA, 26 bp, Homo sapiens
ggaactccatctcctctttgttcagg

SEQ ID NO: 18588 - DNA, 26 bp, Homo sapiens
gaactccatctcctctttgttcaggc

SEQ ID NO: 18589 - DNA, 26 bp, Homo sapiens
aactccatctcctctttgttcaggct

SEQ ID NO: 18590 - DNA, 26 bp, Homo sapiens
actccatctcctctttgttcaggctg

SEQ ID NO: 18591 - DNA, 26 bp, Homo sapiens
ctccatctcctctttgttcaggctga

SEQ ID NO: 18592 - DNA, 26 bp, Homo sapiens
tccatctcctctttgttcaggctgat

SEQ ID NO: 18593 - DNA, 26 bp, Homo sapiens
ccatctcctctttgttcaggctgatg

SEQ ID NO: 18594 - DNA, 26 bp, Homo sapiens
catctcctctttgttcaggctgatgt

SEQ ID NO: 18595 - DNA, 26 bp, Homo sapiens
atctcctctttgttcaggctgatgtt

SEQ ID NO: 18596 - DNA, 26 bp, Homo sapiens
tctcctctttgttcaggctgatgttg

SEQ ID NO: 18597 - DNA, 26 bp, Homo sapiens
ctcctctttgttcaggctgatgttga

SEQ ID NO: 18598 - DNA, 26 bp, Homo sapiens
tcctctttgttcaggctgatgttgaa

SEQ ID NO: 18599 - DNA, 26 bp, Homo sapiens
cctctttgttcaggctgatgttgaag

SEQ ID NO: 18600 - DNA, 26 bp, Homo sapiens
ctctttgttcaggctgatgttgaagg

SEQ ID NO: 18601 - DNA, 26 bp, Homo sapiens
tctttgttcaggctgatgttgaaggt

SEQ ID NO: 18602 - DNA, 26 bp, Homo sapiens
ctttgttcaggctgatgttgaaggtg

SEQ ID NO: 18603 - DNA, 26 bp, Homo sapiens
tttgttcaggctgatgttgaaggtgg

SEQ ID NO: 18604 - DNA, 26 bp, Homo sapiens
ttgttcaggctgatgttgaaggtgga

SEQ ID NO: 18605 - DNA, 26 bp, Homo sapiens
tgttcaggctgatgttgaaggtggag

SEQ ID NO: 18606 - DNA, 26 bp, Homo sapiens
gttcaggctgatgttgaaggtggagc

SEQ ID NO: 18607 - DNA, 26 bp, Homo sapiens
ttcaggctgatgttgaaggtggagcc

SEQ ID NO: 18608 - DNA, 26 bp, Homo sapiens
tcaggctgatgttgaaggtggagccc

SEQ ID NO: 18609 - DNA, 26 bp, Homo sapiens
caggctgatgttgaaggtggagccca

SEQ ID NO: 18610 - DNA, 26 bp, Homo sapiens
aggctgatgttgaaggtggagcccat

SEQ ID NO: 18611 - DNA, 26 bp, Homo sapiens
ggctgatgttgaaggtggagcccata

SEQ ID NO: 18612 - DNA, 26 bp, Homo sapiens
gctgatgttgaaggtggagcccataa

SEQ ID NO: 18613 - DNA, 26 bp, Homo sapiens
ctgatgttgaaggtggagcccataaa

SEQ ID NO: 18614 - DNA, 26 bp, Homo sapiens
tgatgttgaaggtggagcccataaag

SEQ ID NO: 18615 - DNA, 26 bp, Homo sapiens
gatgttgaaggtggagcccataaagg

SEQ ID NO: 18616 - DNA, 26 bp, Homo sapiens
atgttgaaggtggagcccataaagga

SEQ ID NO: 18617 - DNA, 26 bp, Homo sapiens
tgttgaaggtggagcccataaaggag

SEQ ID NO: 18618 - DNA, 26 bp, Homo sapiens
gttgaaggtggagcccataaaggagg

SEQ ID NO: 18619 - DNA, 26 bp, Homo sapiens
ttgaaggtggagcccataaaggaggc

SEQ ID NO: 18620 - DNA, 26 bp, Homo sapiens
tgaaggtggagcccataaaggaggct

SEQ ID NO: 18621 - DNA, 26 bp, Homo sapiens
gaaggtggagcccataaaggaggctc

SEQ ID NO: 18622 - DNA, 26 bp, Homo sapiens
aaggtggagcccataaaggaggctcg

SEQ ID NO: 18623 - DNA, 26 bp, Homo sapiens
aggtggagcccataaaggaggctcga

SEQ ID NO: 18624 - DNA, 26 bp, Homo sapiens
ggtggagcccataaaggaggctcgac

SEQ ID NO: 18625 - DNA, 26 bp, Homo sapiens
gtggagcccataaaggaggctcgacg

SEQ ID NO: 18626 - DNA, 26 bp, Homo sapiens
tggagcccataaaggaggctcgacgg

SEQ ID NO: 18627 - DNA, 26 bp, Homo sapiens
ggagcccataaaggaggctcgacgga

SEQ ID NO: 18628 - DNA, 26 bp, Homo sapiens
gagcccataaaggaggctcgacggaa

SEQ ID NO: 18629 - DNA, 26 bp, Homo sapiens
agcccataaaggaggctcgacggaac

SEQ ID NO: 18630 - DNA, 26 bp, Homo sapiens
gcccataaaggaggctcgacggaact

SEQ ID NO: 18631 - DNA, 26 bp, Homo sapiens
cccataaaggaggctcgacggaactg

SEQ ID NO: 18632 - DNA, 26 bp, Homo sapiens
ccataaaggaggctcgacggaactgg

SEQ ID NO: 18633 - DNA, 26 bp, Homo sapiens
cataaaggaggctcgacggaactggg

SEQ ID NO: 18634 - DNA, 26 bp, Homo sapiens
ataaaggaggctcgacggaactgggc

SEQ ID NO: 18635 - DNA, 26 bp, Homo sapiens
taaaggaggctcgacggaactgggcg

SEQ ID NO: 18636 - DNA, 26 bp, Homo sapiens
aaaggaggctcgacggaactgggcgg

SEQ ID NO: 18637 - DNA, 26 bp, Homo sapiens
aaggaggctcgacggaactgggcgga

SEQ ID NO: 18638 - DNA, 26 bp, Homo sapiens
aggaggctcgacggaactgggcggaa

SEQ ID NO: 18639 - DNA, 26 bp, Homo sapiens
ggaggctcgacggaactgggcggaag

SEQ ID NO: 18640 - DNA, 26 bp, Homo sapiens
gaggctcgacggaactgggcggaagc

SEQ ID NO: 18641 - DNA, 26 bp, Homo sapiens
aggctcgacggaactgggcggaagca

SEQ ID NO: 18642 - DNA, 26 bp, Homo sapiens
ggctcgacggaactgggcggaagcag

SEQ ID NO: 18643 - DNA, 26 bp, Homo sapiens
gctcgacggaactgggcggaagcagc

SEQ ID NO: 18644 - DNA, 26 bp, Homo sapiens
ctcgacggaactgggcggaagcagct

SEQ ID NO: 18645 - DNA, 26 bp, Homo sapiens
tcgacggaactgggcggaagcagctg

SEQ ID NO: 18646 - DNA, 26 bp, Homo sapiens
cgacggaactgggcggaagcagctgt

SEQ ID NO: 18647 - DNA, 26 bp, Homo sapiens
gacggaactgggcggaagcagctgtg

SEQ ID NO: 18648 - DNA, 26 bp, Homo sapiens
acggaactgggcggaagcagctgtgt

SEQ ID NO: 18649 - DNA, 26 bp, Homo sapiens
cggaactgggcggaagcagctgtgta

SEQ ID NO: 18650 - DNA, 26 bp, Homo sapiens
ggaactgggcggaagcagctgtgtag

SEQ ID NO: 18651 - DNA, 26 bp, Homo sapiens
gaactgggcggaagcagctgtgtagg

SEQ ID NO: 18652 - DNA, 26 bp, Homo sapiens
aactgggcggaagcagctgtgtaggg

SEQ ID NO: 18653 - DNA, 26 bp, Homo sapiens
actgggcggaagcagctgtgtagggg

SEQ ID NO: 18654 - DNA, 26 bp, Homo sapiens
ctgggcggaagcagctgtgtaggggg

SEQ ID NO: 18655 - DNA, 26 bp, Homo sapiens
tgggcggaagcagctgtgtagggggg

SEQ ID NO: 18656 - DNA, 26 bp, Homo sapiens
gggcggaagcagctgtgtaggggggc

SEQ ID NO: 18657 - DNA, 26 bp, Homo sapiens
ggcggaagcagctgtgtaggggggct

SEQ ID NO: 18658 - DNA, 26 bp, Homo sapiens
gcggaagcagctgtgtaggggggctg

SEQ ID NO: 18659 - DNA, 26 bp, Homo sapiens
cggaagcagctgtgtaggggggctgt

SEQ ID NO: 18660 - DNA, 26 bp, Homo sapiens
ggaagcagctgtgtaggggggctgtg

SEQ ID NO: 18661 - DNA, 26 bp, Homo sapiens
gaagcagctgtgtaggggggctgtgg

SEQ ID NO: 18662 - DNA, 26 bp, Homo sapiens
aagcagctgtgtaggggggctgtggc

SEQ ID NO: 18663 - DNA, 26 bp, Homo sapiens
agcagctgtgtaggggggctgtggct

SEQ ID NO: 18664 - DNA, 26 bp, Homo sapiens
gcagctgtgtaggggggctgtggctc

SEQ ID NO: 18665 - DNA, 26 bp, Homo sapiens
cagctgtgtaggggggctgtggctcg

SEQ ID NO: 18666 - DNA, 26 bp, Homo sapiens
agctgtgtaggggggctgtggctcgg

SEQ ID NO: 18667 - DNA, 26 bp, Homo sapiens
gctgtgtaggggggctgtggctcggg

SEQ ID NO: 18668 - DNA, 26 bp, Homo sapiens
ctgtgtaggggggctgtggctcgggc

SEQ ID NO: 18669 - DNA, 26 bp, Homo sapiens
tgtgtaggggggctgtggctcgggct

SEQ ID NO: 18670 - DNA, 26 bp, Homo sapiens
gtgtaggggggctgtggctcgggctt

SEQ ID NO: 18671 - DNA, 26 bp, Homo sapiens
tgtaggggggctgtggctcgggctta

SEQ ID NO: 18672 - DNA, 26 bp, Homo sapiens
gtaggggggctgtggctcgggcttat

SEQ ID NO: 18673 - DNA, 26 bp, Homo sapiens
taggggggctgtggctcgggcttatt

SEQ ID NO: 18674 - DNA, 26 bp, Homo sapiens
aggggggctgtggctcgggcttattc

SEQ ID NO: 18675 - DNA, 26 bp, Homo sapiens
ggggggctgtggctcgggcttattcc

SEQ ID NO: 18676 - DNA, 26 bp, Homo sapiens
gggggctgtggctcgggcttattcca

SEQ ID NO: 18677 - DNA, 26 bp, Homo sapiens
ggggctgtggctcgggcttattccag

SEQ ID NO: 18678 - DNA, 26 bp, Homo sapiens
gggctgtggctcgggcttattccagt

SEQ ID NO: 18679 - DNA, 26 bp, Homo sapiens
ggctgtggctcgggcttattccagta

SEQ ID NO: 18680 - DNA, 26 bp, Homo sapiens
gctgtggctcgggcttattccagtac

SEQ ID NO: 18681 - DNA, 26 bp, Homo sapiens
ctgtggctcgggcttattccagtaca

SEQ ID NO: 18682 - DNA, 26 bp, Homo sapiens
tgtggctcgggcttattccagtacat

SEQ ID NO: 18683 - DNA, 26 bp, Homo sapiens
gtggctcgggcttattccagtacatg

SEQ ID NO: 18684 - DNA, 26 bp, Homo sapiens
tggctcgggcttattccagtacatgt

SEQ ID NO: 18685 - DNA, 26 bp, Homo sapiens
ggctcgggcttattccagtacatgtc

SEQ ID NO: 18686 - DNA, 26 bp, Homo sapiens
gctcgggcttattccagtacatgtcc

SEQ ID NO: 18687 - DNA, 26 bp, Homo sapiens
ctcgggcttattccagtacatgtccg

SEQ ID NO: 18688 - DNA, 26 bp, Homo sapiens
tcgggcttattccagtacatgtccgg

SEQ ID NO: 18689 - DNA, 26 bp, Homo sapiens
cgggcttattccagtacatgtccggc

SEQ ID NO: 18690 - DNA, 26 bp, Homo sapiens
gggcttattccagtacatgtccggct

SEQ ID NO: 18691 - DNA, 26 bp, Homo sapiens
ggcttattccagtacatgtccggctc

SEQ ID NO: 18692 - DNA, 26 bp, Homo sapiens
gcttattccagtacatgtccggctcc

SEQ ID NO: 18693 - DNA, 26 bp, Homo sapiens
cttattccagtacatgtccggctcca

SEQ ID NO: 18694 - DNA, 26 bp, Homo sapiens
ttattccagtacatgtccggctccat

SEQ ID NO: 18695 - DNA, 26 bp, Homo sapiens
tattccagtacatgtccggctccatc

SEQ ID NO: 18696 - DNA, 26 bp, Homo sapiens
attccagtacatgtccggctccatcc

SEQ ID NO: 18697 - DNA, 26 bp, Homo sapiens
ttccagtacatgtccggctccatccg

SEQ ID NO: 18698 - DNA, 26 bp, Homo sapiens
tccagtacatgtccggctccatccga

SEQ ID NO: 18699 - DNA, 26 bp, Homo sapiens
ccagtacatgtccggctccatccgag

SEQ ID NO: 18700 - DNA, 26 bp, Homo sapiens
cagtacatgtccggctccatccgagg

SEQ ID NO: 18701 - DNA, 26 bp, Homo sapiens
agtacatgtccggctccatccgaggc

SEQ ID NO: 18702 - DNA, 26 bp, Homo sapiens
gtacatgtccggctccatccgaggca

SEQ ID NO: 18703 - DNA, 26 bp, Homo sapiens
tacatgtccggctccatccgaggcag

SEQ ID NO: 18704 - DNA, 26 bp, Homo sapiens
acatgtccggctccatccgaggcagg

SEQ ID NO: 18705 - DNA, 26 bp, Homo sapiens
catgtccggctccatccgaggcaggt

SEQ ID NO: 18706 - DNA, 26 bp, Homo sapiens
atgtccggctccatccgaggcaggtc

SEQ ID NO: 18707 - DNA, 26 bp, Homo sapiens
tgtccggctccatccgaggcaggtcc

SEQ ID NO: 18708 - DNA, 26 bp, Homo sapiens
gtccggctccatccgaggcaggtcct

SEQ ID NO: 18709 - DNA, 26 bp, Homo sapiens
tccggctccatccgaggcaggtcctg

SEQ ID NO: 18710 - DNA, 26 bp, Homo sapiens
ccggctccatccgaggcaggtcctgg

SEQ ID NO: 18711 - DNA, 26 bp, Homo sapiens
cggctccatccgaggcaggtcctggt

SEQ ID NO: 18712 - DNA, 26 bp, Homo sapiens
ggctccatccgaggcaggtcctggtg

SEQ ID NO: 18713 - DNA, 26 bp, Homo sapiens
gctccatccgaggcaggtcctggtgc

SEQ ID NO: 18714 - DNA, 26 bp, Homo sapiens
ctccatccgaggcaggtcctggtgca

SEQ ID NO: 18715 - DNA, 26 bp, Homo sapiens
tccatccgaggcaggtcctggtgcat

SEQ ID NO: 18716 - DNA, 26 bp, Homo sapiens
ccatccgaggcaggtcctggtgcatc

SEQ ID NO: 18717 - DNA, 26 bp, Homo sapiens
catccgaggcaggtcctggtgcatct

SEQ ID NO: 18718 - DNA, 26 bp, Homo sapiens
atccgaggcaggtcctggtgcatctc

SEQ ID NO: 18719 - DNA, 26 bp, Homo sapiens
tccgaggcaggtcctggtgcatctca

SEQ ID NO: 18720 - DNA, 26 bp, Homo sapiens
ccgaggcaggtcctggtgcatctcat

SEQ ID NO: 18721 - DNA, 26 bp, Homo sapiens
cgaggcaggtcctggtgcatctcatc

SEQ ID NO: 18722 - DNA, 26 bp, Homo sapiens
gaggcaggtcctggtgcatctcatcc

SEQ ID NO: 18723 - DNA, 26 bp, Homo sapiens
aggcaggtcctggtgcatctcatcca

SEQ ID NO: 18724 - DNA, 26 bp, Homo sapiens
ggcaggtcctggtgcatctcatccac

SEQ ID NO: 18725 - DNA, 26 bp, Homo sapiens
gcaggtcctggtgcatctcatccaca

SEQ ID NO: 18726 - DNA, 26 bp, Homo sapiens
caggtcctggtgcatctcatccacag

SEQ ID NO: 18727 - DNA, 26 bp, Homo sapiens
aggtcctggtgcatctcatccacagc

SEQ ID NO: 18728 - DNA, 26 bp, Homo sapiens
ggtcctggtgcatctcatccacagcc

SEQ ID NO: 18729 - DNA, 26 bp, Homo sapiens
gtcctggtgcatctcatccacagcca

SEQ ID NO: 18730 - DNA, 26 bp, Homo sapiens
tcctggtgcatctcatccacagccaa

SEQ ID NO: 18731 - DNA, 26 bp, Homo sapiens
cctggtgcatctcatccacagccaac

SEQ ID NO: 18732 - DNA, 26 bp, Homo sapiens
ctggtgcatctcatccacagccaaca

SEQ ID NO: 18733 - DNA, 26 bp, Homo sapiens
tggtgcatctcatccacagccaacag

SEQ ID NO: 18734 - DNA, 26 bp, Homo sapiens
ggtgcatctcatccacagccaacagg

SEQ ID NO: 18735 - DNA, 26 bp, Homo sapiens
gtgcatctcatccacagccaacaggg

SEQ ID NO: 18736 - DNA, 26 bp, Homo sapiens
tgcatctcatccacagccaacaggga

SEQ ID NO: 18737 - DNA, 26 bp, Homo sapiens
gcatctcatccacagccaacagggac

SEQ ID NO: 18738 - DNA, 26 bp, Homo sapiens
catctcatccacagccaacagggaca

SEQ ID NO: 18739 - DNA, 26 bp, Homo sapiens
atctcatccacagccaacagggacac

SEQ ID NO: 18740 - DNA, 26 bp, Homo sapiens
tctcatccacagccaacagggacacc

SEQ ID NO: 18741 - DNA, 26 bp, Homo sapiens
ctcatccacagccaacagggacacct

SEQ ID NO: 18742 - DNA, 26 bp, Homo sapiens
tcatccacagccaacagggacacctg

SEQ ID NO: 18743 - DNA, 26 bp, Homo sapiens
catccacagccaacagggacacctgc

SEQ ID NO: 18744 - DNA, 26 bp, Homo sapiens
atccacagccaacagggacacctgca

SEQ ID NO: 18745 - DNA, 26 bp, Homo sapiens
tccacagccaacagggacacctgcaa

SEQ ID NO: 18746 - DNA, 26 bp, Homo sapiens
ccacagccaacagggacacctgcaaa

SEQ ID NO: 18747 - DNA, 26 bp, Homo sapiens
cacagccaacagggacacctgcaaat

SEQ ID NO: 18748 - DNA, 26 bp, Homo sapiens
acagccaacagggacacctgcaaatt

SEQ ID NO: 18749 - DNA, 26 bp, Homo sapiens
cagccaacagggacacctgcaaattc

SEQ ID NO: 18750 - DNA, 26 bp, Homo sapiens
agccaacagggacacctgcaaattcc

SEQ ID NO: 18751 - DNA, 26 bp, Homo sapiens
gccaacagggacacctgcaaattcct

SEQ ID NO: 18752 - DNA, 26 bp, Homo sapiens
ccaacagggacacctgcaaattcctg

SEQ ID NO: 18753 - DNA, 26 bp, Homo sapiens
caacagggacacctgcaaattcctgt

SEQ ID NO: 18754 - DNA, 26 bp, Homo sapiens
aacagggacacctgcaaattcctgtc

SEQ ID NO: 18755 - DNA, 26 bp, Homo sapiens
acagggacacctgcaaattcctgtcg

SEQ ID NO: 18756 - DNA, 26 bp, Homo sapiens
cagggacacctgcaaattcctgtcga

SEQ ID NO: 18757 - DNA, 26 bp, Homo sapiens
agggacacctgcaaattcctgtcgac

SEQ ID NO: 18758 - DNA, 26 bp, Homo sapiens
gggacacctgcaaattcctgtcgaca

SEQ ID NO: 18759 - DNA, 26 bp, Homo sapiens
ggacacctgcaaattcctgtcgacaa

SEQ ID NO: 18760 - DNA, 26 bp, Homo sapiens
gacacctgcaaattcctgtcgacaat

SEQ ID NO: 18761 - DNA, 26 bp, Homo sapiens
acacctgcaaattcctgtcgacaatc

SEQ ID NO: 18762 - DNA, 26 bp, Homo sapiens
cacctgcaaattcctgtcgacaatcc

SEQ ID NO: 18763 - DNA, 26 bp, Homo sapiens
acctgcaaattcctgtcgacaatcca

SEQ ID NO: 18764 - DNA, 26 bp, Homo sapiens
cctgcaaattcctgtcgacaatccag

SEQ ID NO: 18765 - DNA, 26 bp, Homo sapiens
ctgcaaattcctgtcgacaatccagt

SEQ ID NO: 18766 - DNA, 26 bp, Homo sapiens
tgcaaattcctgtcgacaatccagtt

SEQ ID NO: 18767 - DNA, 26 bp, Homo sapiens
gcaaattcctgtcgacaatccagttg

SEQ ID NO: 18768 - DNA, 26 bp, Homo sapiens
caaattcctgtcgacaatccagttgg

SEQ ID NO: 18769 - DNA, 26 bp, Homo sapiens
aaattcctgtcgacaatccagttggt

SEQ ID NO: 18770 - DNA, 26 bp, Homo sapiens
aattcctgtcgacaatccagttggtc

SEQ ID NO: 18771 - DNA, 26 bp, Homo sapiens
attcctgtcgacaatccagttggtct

SEQ ID NO: 18772 - DNA, 26 bp, Homo sapiens
ttcctgtcgacaatccagttggtctc

SEQ ID NO: 18773 - DNA, 26 bp, Homo sapiens
tcctgtcgacaatccagttggtctca

SEQ ID NO: 18774 - DNA, 26 bp, Homo sapiens
cctgtcgacaatccagttggtctcaa

SEQ ID NO: 18775 - DNA, 26 bp, Homo sapiens
ctgtcgacaatccagttggtctcaaa

SEQ ID NO: 18776 - DNA, 26 bp, Homo sapiens
tgtcgacaatccagttggtctcaaaa

SEQ ID NO: 18777 - DNA, 26 bp, Homo sapiens
gtcgacaatccagttggtctcaaaat

SEQ ID NO: 18778 - DNA, 26 bp, Homo sapiens
tcgacaatccagttggtctcaaaatc

SEQ ID NO: 18779 - DNA, 26 bp, Homo sapiens
cgacaatccagttggtctcaaaatca

SEQ ID NO: 18780 - DNA, 26 bp, Homo sapiens
gacaatccagttggtctcaaaatcat

SEQ ID NO: 18781 - DNA, 26 bp, Homo sapiens
acaatccagttggtctcaaaatcatc

SEQ ID NO: 18782 - DNA, 26 bp, Homo sapiens
caatccagttggtctcaaaatcatca

SEQ ID NO: 18783 - DNA, 26 bp, Homo sapiens
aatccagttggtctcaaaatcatcat

SEQ ID NO: 18784 - DNA, 26 bp, Homo sapiens
atccagttggtctcaaaatcatcatc

SEQ ID NO: 18785 - DNA, 26 bp, Homo sapiens
tccagttggtctcaaaatcatcatca

SEQ ID NO: 18786 - DNA, 26 bp, Homo sapiens
ccagttggtctcaaaatcatcatcat

SEQ ID NO: 18787 - DNA, 26 bp, Homo sapiens
cagttggtctcaaaatcatcatcatc

SEQ ID NO: 18788 - DNA, 26 bp, Homo sapiens
agttggtctcaaaatcatcatcatcc

SEQ ID NO: 18789 - DNA, 26 bp, Homo sapiens
gttggtctcaaaatcatcatcatcct

SEQ ID NO: 18790 - DNA, 26 bp, Homo sapiens
ttggtctcaaaatcatcatcatcctc

SEQ ID NO: 18791 - DNA, 26 bp, Homo sapiens
tggtctcaaaatcatcatcatcctct

SEQ ID NO: 18792 - DNA, 26 bp, Homo sapiens
ggtctcaaaatcatcatcatcctctc

SEQ ID NO: 18793 - DNA, 26 bp, Homo sapiens
gtctcaaaatcatcatcatcctctcc

SEQ ID NO: 18794 - DNA, 26 bp, Homo sapiens
tctcaaaatcatcatcatcctctcca

SEQ ID NO: 18795 - DNA, 26 bp, Homo sapiens
ctcaaaatcatcatcatcctctccaa

SEQ ID NO: 18796 - DNA, 26 bp, Homo sapiens
tcaaaatcatcatcatcctctccaaa

SEQ ID NO: 18797 - DNA, 26 bp, Homo sapiens
caaaatcatcatcatcctctccaaag

SEQ ID NO: 18798 - DNA, 26 bp, Homo sapiens
aaaatcatcatcatcctctccaaagg

SEQ ID NO: 18799 - DNA, 26 bp, Homo sapiens
aaatcatcatcatcctctccaaaggg

SEQ ID NO: 18800 - DNA, 26 bp, Homo sapiens
aatcatcatcatcctctccaaagggg

SEQ ID NO: 18801 - DNA, 26 bp, Homo sapiens
atcatcatcatcctctccaaaggggt

SEQ ID NO: 18802 - DNA, 26 bp, Homo sapiens
tcatcatcatcctctccaaaggggtt

SEQ ID NO: 18803 - DNA, 26 bp, Homo sapiens
catcatcatcctctccaaaggggttg

SEQ ID NO: 18804 - DNA, 26 bp, Homo sapiens
atcatcatcctctccaaaggggttga

SEQ ID NO: 18805 - DNA, 26 bp, Homo sapiens
tcatcatcctctccaaaggggttgat

SEQ ID NO: 18806 - DNA, 26 bp, Homo sapiens
catcatcctctccaaaggggttgatg

SEQ ID NO: 18807 - DNA, 26 bp, Homo sapiens
atcatcctctccaaaggggttgatga

SEQ ID NO: 18808 - DNA, 26 bp, Homo sapiens
tcatcctctccaaaggggttgatgag

SEQ ID NO: 18809 - DNA, 26 bp, Homo sapiens
catcctctccaaaggggttgatgagc

SEQ ID NO: 18810 - DNA, 26 bp, Homo sapiens
atcctctccaaaggggttgatgagct

SEQ ID NO: 18811 - DNA, 26 bp, Homo sapiens
tcctctccaaaggggttgatgagctg

SEQ ID NO: 18812 - DNA, 26 bp, Homo sapiens
cctctccaaaggggttgatgagctgc

SEQ ID NO: 18813 - DNA, 26 bp, Homo sapiens
ctctccaaaggggttgatgagctgct

SEQ ID NO: 18814 - DNA, 26 bp, Homo sapiens
tctccaaaggggttgatgagctgctc

SEQ ID NO: 18815 - DNA, 26 bp, Homo sapiens
ctccaaaggggttgatgagctgctct

SEQ ID NO: 18816 - DNA, 26 bp, Homo sapiens
tccaaaggggttgatgagctgctctg

SEQ ID NO: 18817 - DNA, 26 bp, Homo sapiens
ccaaaggggttgatgagctgctctgc

SEQ ID NO: 18818 - DNA, 26 bp, Homo sapiens
caaaggggttgatgagctgctctgcc

SEQ ID NO: 18819 - DNA, 26 bp, Homo sapiens
aaaggggttgatgagctgctctgcca

SEQ ID NO: 18820 - DNA, 26 bp, Homo sapiens
aaggggttgatgagctgctctgccac

SEQ ID NO: 18821 - DNA, 26 bp, Homo sapiens
aggggttgatgagctgctctgccacc

SEQ ID NO: 18822 - DNA, 26 bp, Homo sapiens
ggggttgatgagctgctctgccacct

SEQ ID NO: 18823 - DNA, 26 bp, Homo sapiens
gggttgatgagctgctctgccacctt

SEQ ID NO: 18824 - DNA, 26 bp, Homo sapiens
ggttgatgagctgctctgccaccttc

SEQ ID NO: 18825 - DNA, 26 bp, Homo sapiens
gttgatgagctgctctgccaccttca

SEQ ID NO: 18826 - DNA, 26 bp, Homo sapiens
ttgatgagctgctctgccaccttcag

SEQ ID NO: 18827 - DNA, 26 bp, Homo sapiens
tgatgagctgctctgccaccttcagc

SEQ ID NO: 18828 - DNA, 26 bp, Homo sapiens
gatgagctgctctgccaccttcagcc

SEQ ID NO: 18829 - DNA, 26 bp, Homo sapiens
atgagctgctctgccaccttcagcca

SEQ ID NO: 18830 - DNA, 26 bp, Homo sapiens
tgagctgctctgccaccttcagccag

SEQ ID NO: 18831 - DNA, 26 bp, Homo sapiens
gagctgctctgccaccttcagccagc

SEQ ID NO: 18832 - DNA, 26 bp, Homo sapiens
agctgctctgccaccttcagccagcc

SEQ ID NO: 18833 - DNA, 26 bp, Homo sapiens
gctgctctgccaccttcagccagcca

SEQ ID NO: 18834 - DNA, 26 bp, Homo sapiens
ctgctctgccaccttcagccagccaa

SEQ ID NO: 18835 - DNA, 26 bp, Homo sapiens
tgctctgccaccttcagccagccaac

SEQ ID NO: 18836 - DNA, 26 bp, Homo sapiens
gctctgccaccttcagccagccaaca

SEQ ID NO: 18837 - DNA, 26 bp, Homo sapiens
ctctgccaccttcagccagccaacat

SEQ ID NO: 18838 - DNA, 26 bp, Homo sapiens
tctgccaccttcagccagccaacata

SEQ ID NO: 18839 - DNA, 26 bp, Homo sapiens
ctgccaccttcagccagccaacatag

SEQ ID NO: 18840 - DNA, 26 bp, Homo sapiens
tgccaccttcagccagccaacataga

SEQ ID NO: 18841 - DNA, 26 bp, Homo sapiens
gccaccttcagccagccaacatagaa

SEQ ID NO: 18842 - DNA, 26 bp, Homo sapiens
ccaccttcagccagccaacatagaag

SEQ ID NO: 18843 - DNA, 26 bp, Homo sapiens
caccttcagccagccaacatagaaga

SEQ ID NO: 18844 - DNA, 26 bp, Homo sapiens
accttcagccagccaacatagaagaa

SEQ ID NO: 18845 - DNA, 26 bp, Homo sapiens
ccttcagccagccaacatagaagaag

SEQ ID NO: 18846 - DNA, 26 bp, Homo sapiens
cttcagccagccaacatagaagaaga

SEQ ID NO: 18847 - DNA, 26 bp, Homo sapiens
ttcagccagccaacatagaagaagaa

SEQ ID NO: 18848 - DNA, 26 bp, Homo sapiens
tcagccagccaacatagaagaagaac

SEQ ID NO: 18849 - DNA, 26 bp, Homo sapiens
cagccagccaacatagaagaagaact

SEQ ID NO: 18850 - DNA, 26 bp, Homo sapiens
agccagccaacatagaagaagaactg

SEQ ID NO: 18851 - DNA, 26 bp, Homo sapiens
gccagccaacatagaagaagaactgc

SEQ ID NO: 18852 - DNA, 26 bp, Homo sapiens
ccagccaacatagaagaagaactgca

SEQ ID NO: 18853 - DNA, 26 bp, Homo sapiens
cagccaacatagaagaagaactgcag

SEQ ID NO: 18854 - DNA, 26 bp, Homo sapiens
agccaacatagaagaagaactgcagg

SEQ ID NO: 18855 - DNA, 26 bp, Homo sapiens
gccaacatagaagaagaactgcagga

SEQ ID NO: 18856 - DNA, 26 bp, Homo sapiens
ccaacatagaagaagaactgcaggaa

SEQ ID NO: 18857 - DNA, 26 bp, Homo sapiens
caacatagaagaagaactgcaggaac

SEQ ID NO: 18858 - DNA, 26 bp, Homo sapiens
aacatagaagaagaactgcaggaacg

SEQ ID NO: 18859 - DNA, 26 bp, Homo sapiens
acatagaagaagaactgcaggaacgt

SEQ ID NO: 18860 - DNA, 26 bp, Homo sapiens
catagaagaagaactgcaggaacgtg

SEQ ID NO: 18861 - DNA, 26 bp, Homo sapiens
atagaagaagaactgcaggaacgtga

SEQ ID NO: 18862 - DNA, 26 bp, Homo sapiens
tagaagaagaactgcaggaacgtgaa

SEQ ID NO: 18863 - DNA, 26 bp, Homo sapiens
agaagaagaactgcaggaacgtgaag

SEQ ID NO: 18864 - DNA, 26 bp, Homo sapiens
gaagaagaactgcaggaacgtgaaga

SEQ ID NO: 18865 - DNA, 26 bp, Homo sapiens
aagaagaactgcaggaacgtgaagac

SEQ ID NO: 18866 - DNA, 26 bp, Homo sapiens
agaagaactgcaggaacgtgaagacg

SEQ ID NO: 18867 - DNA, 26 bp, Homo sapiens
gaagaactgcaggaacgtgaagacgg

SEQ ID NO: 18868 - DNA, 26 bp, Homo sapiens
aagaactgcaggaacgtgaagacggg

SEQ ID NO: 18869 - DNA, 26 bp, Homo sapiens
agaactgcaggaacgtgaagacgggc

SEQ ID NO: 18870 - DNA, 26 bp, Homo sapiens
gaactgcaggaacgtgaagacgggca

SEQ ID NO: 18871 - DNA, 26 bp, Homo sapiens
aactgcaggaacgtgaagacgggcac

SEQ ID NO: 18872 - DNA, 26 bp, Homo sapiens
actgcaggaacgtgaagacgggcaca

SEQ ID NO: 18873 - DNA, 26 bp, Homo sapiens
ctgcaggaacgtgaagacgggcacaa

SEQ ID NO: 18874 - DNA, 26 bp, Homo sapiens
tgcaggaacgtgaagacgggcacaac

SEQ ID NO: 18875 - DNA, 26 bp, Homo sapiens
gcaggaacgtgaagacgggcacaacg

SEQ ID NO: 18876 - DNA, 26 bp, Homo sapiens
caggaacgtgaagacgggcacaacga

SEQ ID NO: 18877 - DNA, 26 bp, Homo sapiens
aggaacgtgaagacgggcacaacgag

SEQ ID NO: 18878 - DNA, 26 bp, Homo sapiens
ggaacgtgaagacgggcacaacgagg

SEQ ID NO: 18879 - DNA, 26 bp, Homo sapiens
gaacgtgaagacgggcacaacgaggt

SEQ ID NO: 18880 - DNA, 26 bp, Homo sapiens
aacgtgaagacgggcacaacgaggtc

SEQ ID NO: 18881 - DNA, 26 bp, Homo sapiens
acgtgaagacgggcacaacgaggtcc

SEQ ID NO: 18882 - DNA, 26 bp, Homo sapiens
cgtgaagacgggcacaacgaggtcca

SEQ ID NO: 18883 - DNA, 26 bp, Homo sapiens
gtgaagacgggcacaacgaggtccag

SEQ ID NO: 18884 - DNA, 26 bp, Homo sapiens
tgaagacgggcacaacgaggtccagc

SEQ ID NO: 18885 - DNA, 26 bp, Homo sapiens
gaagacgggcacaacgaggtccagct

SEQ ID NO: 18886 - DNA, 26 bp, Homo sapiens
aagacgggcacaacgaggtccagctc

SEQ ID NO: 18887 - DNA, 26 bp, Homo sapiens
agacgggcacaacgaggtccagctca

SEQ ID NO: 18888 - DNA, 26 bp, Homo sapiens
gacgggcacaacgaggtccagctcat

SEQ ID NO: 18889 - DNA, 26 bp, Homo sapiens
acgggcacaacgaggtccagctcatg

SEQ ID NO: 18890 - DNA, 26 bp, Homo sapiens
cgggcacaacgaggtccagctcatgg

SEQ ID NO: 18891 - DNA, 26 bp, Homo sapiens
gggcacaacgaggtccagctcatggc

SEQ ID NO: 18892 - DNA, 26 bp, Homo sapiens
ggcacaacgaggtccagctcatggcc

SEQ ID NO: 18893 - DNA, 26 bp, Homo sapiens
gcacaacgaggtccagctcatggcca

SEQ ID NO: 18894 - DNA, 26 bp, Homo sapiens
cacaacgaggtccagctcatggccag

SEQ ID NO: 18895 - DNA, 26 bp, Homo sapiens
acaacgaggtccagctcatggccagg

SEQ ID NO: 18896 - DNA, 26 bp, Homo sapiens
caacgaggtccagctcatggccaggg

SEQ ID NO: 18897 - DNA, 26 bp, Homo sapiens
aacgaggtccagctcatggccagggt

SEQ ID NO: 18898 - DNA, 26 bp, Homo sapiens
acgaggtccagctcatggccagggta

SEQ ID NO: 18899 - DNA, 26 bp, Homo sapiens
cgaggtccagctcatggccagggtag

SEQ ID NO: 18900 - DNA, 26 bp, Homo sapiens
gaggtccagctcatggccagggtagg

SEQ ID NO: 18901 - DNA, 26 bp, Homo sapiens
aggtccagctcatggccagggtaggc

SEQ ID NO: 18902 - DNA, 26 bp, Homo sapiens
ggtccagctcatggccagggtaggcc

SEQ ID NO: 18903 - DNA, 26 bp, Homo sapiens
gtccagctcatggccagggtaggcct

SEQ ID NO: 18904 - DNA, 26 bp, Homo sapiens
tccagctcatggccagggtaggcctt

SEQ ID NO: 18905 - DNA, 26 bp, Homo sapiens
ccagctcatggccagggtaggccttg

SEQ ID NO: 18906 - DNA, 26 bp, Homo sapiens
cagctcatggccagggtaggccttgg

SEQ ID NO: 18907 - DNA, 26 bp, Homo sapiens
agctcatggccagggtaggccttggc

SEQ ID NO: 18908 - DNA, 26 bp, Homo sapiens
gctcatggccagggtaggccttggct

SEQ ID NO: 18909 - DNA, 26 bp, Homo sapiens
ctcatggccagggtaggccttggctg

SEQ ID NO: 18910 - DNA, 26 bp, Homo sapiens
tcatggccagggtaggccttggctgg

SEQ ID NO: 18911 - DNA, 26 bp, Homo sapiens
catggccagggtaggccttggctggg

SEQ ID NO: 18912 - DNA, 26 bp, Homo sapiens
atggccagggtaggccttggctgggt

SEQ ID NO: 18913 - DNA, 26 bp, Homo sapiens
tggccagggtaggccttggctgggtt

SEQ ID NO: 18914 - DNA, 26 bp, Homo sapiens
ggccagggtaggccttggctgggttc

SEQ ID NO: 18915 - DNA, 26 bp, Homo sapiens
gccagggtaggccttggctgggttca

SEQ ID NO: 18916 - DNA, 26 bp, Homo sapiens
ccagggtaggccttggctgggttcag

SEQ ID NO: 18917 - DNA, 26 bp, Homo sapiens
cagggtaggccttggctgggttcaga

SEQ ID NO: 18918 - DNA, 26 bp, Homo sapiens
agggtaggccttggctgggttcagaa

SEQ ID NO: 18919 - DNA, 26 bp, Homo sapiens
gggtaggccttggctgggttcagaaa

SEQ ID NO: 18920 - DNA, 26 bp, Homo sapiens
ggtaggccttggctgggttcagaaac

SEQ ID NO: 18921 - DNA, 26 bp, Homo sapiens
gtaggccttggctgggttcagaaact

SEQ ID NO: 18922 - DNA, 26 bp, Homo sapiens
taggccttggctgggttcagaaactg

SEQ ID NO: 18923 - DNA, 26 bp, Homo sapiens
aggccttggctgggttcagaaactgc

SEQ ID NO: 18924 - DNA, 26 bp, Homo sapiens
ggccttggctgggttcagaaactgcc

SEQ ID NO: 18925 - DNA, 26 bp, Homo sapiens
gccttggctgggttcagaaactgccg

SEQ ID NO: 18926 - DNA, 26 bp, Homo sapiens
ccttggctgggttcagaaactgccgc

SEQ ID NO: 18927 - DNA, 26 bp, Homo sapiens
cttggctgggttcagaaactgccgcc

SEQ ID NO: 18928 - DNA, 26 bp, Homo sapiens
ttggctgggttcagaaactgccgccc

SEQ ID NO: 18929 - DNA, 26 bp, Homo sapiens
tggctgggttcagaaactgccgccca

SEQ ID NO: 18930 - DNA, 26 bp, Homo sapiens
ggctgggttcagaaactgccgcccaa

SEQ ID NO: 18931 - DNA, 26 bp, Homo sapiens
gctgggttcagaaactgccgcccaac

SEQ ID NO: 18932 - DNA, 26 bp, Homo sapiens
ctgggttcagaaactgccgcccaact

SEQ ID NO: 18933 - DNA, 26 bp, Homo sapiens
tgggttcagaaactgccgcccaacta

SEQ ID NO: 18934 - DNA, 26 bp, Homo sapiens
gggttcagaaactgccgcccaactag

SEQ ID NO: 18935 - DNA, 26 bp, Homo sapiens
ggttcagaaactgccgcccaactaga

SEQ ID NO: 18936 - DNA, 26 bp, Homo sapiens
gttcagaaactgccgcccaactagac

SEQ ID NO: 18937 - DNA, 26 bp, Homo sapiens
ttcagaaactgccgcccaactagaca

SEQ ID NO: 18938 - DNA, 26 bp, Homo sapiens
tcagaaactgccgcccaactagacaa

SEQ ID NO: 18939 - DNA, 26 bp, Homo sapiens
cagaaactgccgcccaactagacaag

SEQ ID NO: 18940 - DNA, 26 bp, Homo sapiens
agaaactgccgcccaactagacaagt

SEQ ID NO: 18941 - DNA, 26 bp, Homo sapiens
gaaactgccgcccaactagacaagtc

SEQ ID NO: 18942 - DNA, 26 bp, Homo sapiens
aaactgccgcccaactagacaagtca

SEQ ID NO: 18943 - DNA, 26 bp, Homo sapiens
aactgccgcccaactagacaagtcag

SEQ ID NO: 18944 - DNA, 26 bp, Homo sapiens
actgccgcccaactagacaagtcagg

SEQ ID NO: 18945 - DNA, 26 bp, Homo sapiens
ctgccgcccaactagacaagtcagga

SEQ ID NO: 18946 - DNA, 26 bp, Homo sapiens
tgccgcccaactagacaagtcaggaa

SEQ ID NO: 18947 - DNA, 26 bp, Homo sapiens
gccgcccaactagacaagtcaggaag

SEQ ID NO: 18948 - DNA, 26 bp, Homo sapiens
ccgcccaactagacaagtcaggaaga

SEQ ID NO: 18949 - DNA, 26 bp, Homo sapiens
cgcccaactagacaagtcaggaagaa

SEQ ID NO: 18950 - DNA, 26 bp, Homo sapiens
gcccaactagacaagtcaggaagaag

SEQ ID NO: 18951 - DNA, 26 bp, Homo sapiens
cccaactagacaagtcaggaagaagc

SEQ ID NO: 18952 - DNA, 26 bp, Homo sapiens
ccaactagacaagtcaggaagaagct

SEQ ID NO: 18953 - DNA, 26 bp, Homo sapiens
caactagacaagtcaggaagaagctg

SEQ ID NO: 18954 - DNA, 26 bp, Homo sapiens
aactagacaagtcaggaagaagctgt

SEQ ID NO: 18955 - DNA, 26 bp, Homo sapiens
actagacaagtcaggaagaagctgta

SEQ ID NO: 18956 - DNA, 26 bp, Homo sapiens
ctagacaagtcaggaagaagctgtac

SEQ ID NO: 18957 - DNA, 26 bp, Homo sapiens
tagacaagtcaggaagaagctgtaca

SEQ ID NO: 18958 - DNA, 26 bp, Homo sapiens
agacaagtcaggaagaagctgtacac

SEQ ID NO: 18959 - DNA, 26 bp, Homo sapiens
gacaagtcaggaagaagctgtacacc

SEQ ID NO: 18960 - DNA, 26 bp, Homo sapiens
acaagtcaggaagaagctgtacaccg

SEQ ID NO: 18961 - DNA, 26 bp, Homo sapiens
caagtcaggaagaagctgtacaccgc

SEQ ID NO: 18962 - DNA, 26 bp, Homo sapiens
aagtcaggaagaagctgtacaccgcc

SEQ ID NO: 18963 - DNA, 26 bp, Homo sapiens
agtcaggaagaagctgtacaccgcca

SEQ ID NO: 18964 - DNA, 26 bp, Homo sapiens
gtcaggaagaagctgtacaccgccac

SEQ ID NO: 18965 - DNA, 26 bp, Homo sapiens
tcaggaagaagctgtacaccgccaca

SEQ ID NO: 18966 - DNA, 26 bp, Homo sapiens
caggaagaagctgtacaccgccacag

SEQ ID NO: 18967 - DNA, 26 bp, Homo sapiens
aggaagaagctgtacaccgccacagt

SEQ ID NO: 18968 - DNA, 26 bp, Homo sapiens
ggaagaagctgtacaccgccacagtc

SEQ ID NO: 18969 - DNA, 26 bp, Homo sapiens
gaagaagctgtacaccgccacagtca

SEQ ID NO: 18970 - DNA, 26 bp, Homo sapiens
aagaagctgtacaccgccacagtcac

SEQ ID NO: 18971 - DNA, 26 bp, Homo sapiens
agaagctgtacaccgccacagtcacc

SEQ ID NO: 18972 - DNA, 26 bp, Homo sapiens
gaagctgtacaccgccacagtcacca

SEQ ID NO: 18973 - DNA, 26 bp, Homo sapiens
aagctgtacaccgccacagtcaccac

SEQ ID NO: 18974 - DNA, 26 bp, Homo sapiens
agctgtacaccgccacagtcaccacc

SEQ ID NO: 18975 - DNA, 26 bp, Homo sapiens
gctgtacaccgccacagtcaccacct

SEQ ID NO: 18976 - DNA, 26 bp, Homo sapiens
ctgtacaccgccacagtcaccacctg

SEQ ID NO: 18977 - DNA, 26 bp, Homo sapiens
tgtacaccgccacagtcaccacctgt

SEQ ID NO: 18978 - DNA, 26 bp, Homo sapiens
gtacaccgccacagtcaccacctgtg

SEQ ID NO: 18979 - DNA, 26 bp, Homo sapiens
tacaccgccacagtcaccacctgtgt

SEQ ID NO: 18980 - DNA, 26 bp, Homo sapiens
acaccgccacagtcaccacctgtgta

SEQ ID NO: 18981 - DNA, 26 bp, Homo sapiens
caccgccacagtcaccacctgtgtat

SEQ ID NO: 18982 - DNA, 26 bp, Homo sapiens
accgccacagtcaccacctgtgtata

SEQ ID NO: 18983 - DNA, 26 bp, Homo sapiens
ccgccacagtcaccacctgtgtatac

SEQ ID NO: 18984 - DNA, 26 bp, Homo sapiens
cgccacagtcaccacctgtgtataca

SEQ ID NO: 18985 - DNA, 26 bp, Homo sapiens
gccacagtcaccacctgtgtatacac

SEQ ID NO: 18986 - DNA, 26 bp, Homo sapiens
ccacagtcaccacctgtgtatacacc

SEQ ID NO: 18987 - DNA, 26 bp, Homo sapiens
cacagtcaccacctgtgtatacacca

SEQ ID NO: 18988 - DNA, 26 bp, Homo sapiens
acagtcaccacctgtgtatacaccag

SEQ ID NO: 18989 - DNA, 26 bp, Homo sapiens
cagtcaccacctgtgtatacaccagt

SEQ ID NO: 18990 - DNA, 26 bp, Homo sapiens
agtcaccacctgtgtatacaccagtg

SEQ ID NO: 18991 - DNA, 26 bp, Homo sapiens
gtcaccacctgtgtatacaccagtgg

SEQ ID NO: 18992 - DNA, 26 bp, Homo sapiens
tcaccacctgtgtatacaccagtggg

SEQ ID NO: 18993 - DNA, 26 bp, Homo sapiens
caccacctgtgtatacaccagtggga

SEQ ID NO: 18994 - DNA, 26 bp, Homo sapiens
accacctgtgtatacaccagtgggat

SEQ ID NO: 18995 - DNA, 26 bp, Homo sapiens
ccacctgtgtatacaccagtgggata

SEQ ID NO: 18996 - DNA, 26 bp, Homo sapiens
cacctgtgtatacaccagtgggatac

SEQ ID NO: 18997 - DNA, 26 bp, Homo sapiens
acctgtgtatacaccagtgggatact

SEQ ID NO: 18998 - DNA, 26 bp, Homo sapiens
cctgtgtatacaccagtgggatacta

SEQ ID NO: 18999 - DNA, 26 bp, Homo sapiens
ctgtgtatacaccagtgggatactaa

SEQ ID NO: 19000 - DNA, 26 bp, Homo sapiens
tgtgtatacaccagtgggatactaat

SEQ ID NO: 19001 - DNA, 26 bp, Homo sapiens
gtgtatacaccagtgggatactaatc

SEQ ID NO: 19002 - DNA, 26 bp, Homo sapiens
tgtatacaccagtgggatactaatcc

SEQ ID NO: 19003 - DNA, 26 bp, Homo sapiens
gtatacaccagtgggatactaatcca

SEQ ID NO: 19004 - DNA, 26 bp, Homo sapiens
tatacaccagtgggatactaatccag

SEQ ID NO: 19005 - DNA, 26 bp, Homo sapiens
atacaccagtgggatactaatccagt

SEQ ID NO: 19006 - DNA, 26 bp, Homo sapiens
tacaccagtgggatactaatccagtc

SEQ ID NO: 19007 - DNA, 26 bp, Homo sapiens
acaccagtgggatactaatccagtcg

SEQ ID NO: 19008 - DNA, 26 bp, Homo sapiens
caccagtgggatactaatccagtcgt

SEQ ID NO: 19009 - DNA, 26 bp, Homo sapiens
accagtgggatactaatccagtcgta

SEQ ID NO: 19010 - DNA, 26 bp, Homo sapiens
ccagtgggatactaatccagtcgtag

SEQ ID NO: 19011 - DNA, 26 bp, Homo sapiens
cagtgggatactaatccagtcgtagg

SEQ ID NO: 19012 - DNA, 26 bp, Homo sapiens
agtgggatactaatccagtcgtaggc

SEQ ID NO: 19013 - DNA, 26 bp, Homo sapiens
gtgggatactaatccagtcgtaggca

SEQ ID NO: 19014 - DNA, 26 bp, Homo sapiens
tgggatactaatccagtcgtaggcat

SEQ ID NO: 19015 - DNA, 26 bp, Homo sapiens
gggatactaatccagtcgtaggcata

SEQ ID NO: 19016 - DNA, 26 bp, Homo sapiens
ggatactaatccagtcgtaggcatac

SEQ ID NO: 19017 - DNA, 26 bp, Homo sapiens
gatactaatccagtcgtaggcataca

SEQ ID NO: 19018 - DNA, 26 bp, Homo sapiens
atactaatccagtcgtaggcatacag

SEQ ID NO: 19019 - DNA, 26 bp, Homo sapiens
tactaatccagtcgtaggcatacagg

SEQ ID NO: 19020 - DNA, 26 bp, Homo sapiens
actaatccagtcgtaggcatacaggt

SEQ ID NO: 19021 - DNA, 26 bp, Homo sapiens
ctaatccagtcgtaggcatacaggtg

SEQ ID NO: 19022 - DNA, 26 bp, Homo sapiens
taatccagtcgtaggcatacaggtgt

SEQ ID NO: 19023 - DNA, 26 bp, Homo sapiens
aatccagtcgtaggcatacaggtgtc

SEQ ID NO: 19024 - DNA, 26 bp, Homo sapiens
atccagtcgtaggcatacaggtgtcc

SEQ ID NO: 19025 - DNA, 26 bp, Homo sapiens
tccagtcgtaggcatacaggtgtcca

SEQ ID NO: 19026 - DNA, 26 bp, Homo sapiens
ccagtcgtaggcatacaggtgtccac

SEQ ID NO: 19027 - DNA, 26 bp, Homo sapiens
cagtcgtaggcatacaggtgtccaca

SEQ ID NO: 19028 - DNA, 26 bp, Homo sapiens
agtcgtaggcatacaggtgtccacac

SEQ ID NO: 19029 - DNA, 26 bp, Homo sapiens
gtcgtaggcatacaggtgtccacact

SEQ ID NO: 19030 - DNA, 26 bp, Homo sapiens
tcgtaggcatacaggtgtccacactg

SEQ ID NO: 19031 - DNA, 26 bp, Homo sapiens
cgtaggcatacaggtgtccacactga

SEQ ID NO: 19032 - DNA, 26 bp, Homo sapiens
gtaggcatacaggtgtccacactgag

SEQ ID NO: 19033 - DNA, 26 bp, Homo sapiens
taggcatacaggtgtccacactgagt

SEQ ID NO: 19034 - DNA, 26 bp, Homo sapiens
aggcatacaggtgtccacactgagta

SEQ ID NO: 19035 - DNA, 26 bp, Homo sapiens
ggcatacaggtgtccacactgagtac

SEQ ID NO: 19036 - DNA, 26 bp, Homo sapiens
gcatacaggtgtccacactgagtacg

SEQ ID NO: 19037 - DNA, 26 bp, Homo sapiens
catacaggtgtccacactgagtacgc

SEQ ID NO: 19038 - DNA, 26 bp, Homo sapiens
atacaggtgtccacactgagtacgca

SEQ ID NO: 19039 - DNA, 26 bp, Homo sapiens
tacaggtgtccacactgagtacgcaa

SEQ ID NO: 19040 - DNA, 26 bp, Homo sapiens
acaggtgtccacactgagtacgcaag

SEQ ID NO: 19041 - DNA, 26 bp, Homo sapiens
caggtgtccacactgagtacgcaagg

SEQ ID NO: 19042 - DNA, 26 bp, Homo sapiens
aggtgtccacactgagtacgcaaggt

SEQ ID NO: 19043 - DNA, 26 bp, Homo sapiens
ggtgtccacactgagtacgcaaggtg

SEQ ID NO: 19044 - DNA, 26 bp, Homo sapiens
gtgtccacactgagtacgcaaggtgt

SEQ ID NO: 19045 - DNA, 26 bp, Homo sapiens
tgtccacactgagtacgcaaggtgtt

SEQ ID NO: 19046 - DNA, 26 bp, Homo sapiens
gtccacactgagtacgcaaggtgttc

SEQ ID NO: 19047 - DNA, 26 bp, Homo sapiens
tccacactgagtacgcaaggtgttca

SEQ ID NO: 19048 - DNA, 26 bp, Homo sapiens
ccacactgagtacgcaaggtgttcat

SEQ ID NO: 19049 - DNA, 26 bp, Homo sapiens
cacactgagtacgcaaggtgttcatc

SEQ ID NO: 19050 - DNA, 26 bp, Homo sapiens
acactgagtacgcaaggtgttcatct

SEQ ID NO: 19051 - DNA, 26 bp, Homo sapiens
cactgagtacgcaaggtgttcatctc

SEQ ID NO: 19052 - DNA, 26 bp, Homo sapiens
actgagtacgcaaggtgttcatctcg

SEQ ID NO: 19053 - DNA, 26 bp, Homo sapiens
ctgagtacgcaaggtgttcatctcgt

SEQ ID NO: 19054 - DNA, 26 bp, Homo sapiens
tgagtacgcaaggtgttcatctcgtt

SEQ ID NO: 19055 - DNA, 26 bp, Homo sapiens
gagtacgcaaggtgttcatctcgttc

SEQ ID NO: 19056 - DNA, 26 bp, Homo sapiens
agtacgcaaggtgttcatctcgttca

SEQ ID NO: 19057 - DNA, 26 bp, Homo sapiens
gtacgcaaggtgttcatctcgttcag

SEQ ID NO: 19058 - DNA, 26 bp, Homo sapiens
tacgcaaggtgttcatctcgttcagc

SEQ ID NO: 19059 - DNA, 26 bp, Homo sapiens
acgcaaggtgttcatctcgttcagca

SEQ ID NO: 19060 - DNA, 26 bp, Homo sapiens
cgcaaggtgttcatctcgttcagcag

SEQ ID NO: 19061 - DNA, 26 bp, Homo sapiens
gcaaggtgttcatctcgttcagcagg

SEQ ID NO: 19062 - DNA, 26 bp, Homo sapiens
caaggtgttcatctcgttcagcaggc

SEQ ID NO: 19063 - DNA, 26 bp, Homo sapiens
aaggtgttcatctcgttcagcaggct

SEQ ID NO: 19064 - DNA, 26 bp, Homo sapiens
aggtgttcatctcgttcagcaggctc

SEQ ID NO: 19065 - DNA, 26 bp, Homo sapiens
ggtgttcatctcgttcagcaggctct

SEQ ID NO: 19066 - DNA, 26 bp, Homo sapiens
gtgttcatctcgttcagcaggctctg

SEQ ID NO: 19067 - DNA, 26 bp, Homo sapiens
tgttcatctcgttcagcaggctctgg

SEQ ID NO: 19068 - DNA, 26 bp, Homo sapiens
gttcatctcgttcagcaggctctgga

SEQ ID NO: 19069 - DNA, 26 bp, Homo sapiens
ttcatctcgttcagcaggctctggag

SEQ ID NO: 19070 - DNA, 26 bp, Homo sapiens
tcatctcgttcagcaggctctggagc

SEQ ID NO: 19071 - DNA, 26 bp, Homo sapiens
catctcgttcagcaggctctggagca

SEQ ID NO: 19072 - DNA, 26 bp, Homo sapiens
atctcgttcagcaggctctggagcag

SEQ ID NO: 19073 - DNA, 26 bp, Homo sapiens
tctcgttcagcaggctctggagcagg

SEQ ID NO: 19074 - DNA, 26 bp, Homo sapiens
ctcgttcagcaggctctggagcagga

SEQ ID NO: 19075 - DNA, 26 bp, Homo sapiens
tcgttcagcaggctctggagcaggat

SEQ ID NO: 19076 - DNA, 26 bp, Homo sapiens
cgttcagcaggctctggagcaggata

SEQ ID NO: 19077 - DNA, 26 bp, Homo sapiens
gttcagcaggctctggagcaggatag

SEQ ID NO: 19078 - DNA, 26 bp, Homo sapiens
ttcagcaggctctggagcaggatagg

SEQ ID NO: 19079 - DNA, 26 bp, Homo sapiens
tcagcaggctctggagcaggataggg

SEQ ID NO: 19080 - DNA, 26 bp, Homo sapiens
cagcaggctctggagcaggatagggt

SEQ ID NO: 19081 - DNA, 26 bp, Homo sapiens
agcaggctctggagcaggatagggtc

SEQ ID NO: 19082 - DNA, 26 bp, Homo sapiens
gcaggctctggagcaggatagggtcc

SEQ ID NO: 19083 - DNA, 26 bp, Homo sapiens
caggctctggagcaggatagggtccc

SEQ ID NO: 19084 - DNA, 26 bp, Homo sapiens
aggctctggagcaggatagggtcccg

SEQ ID NO: 19085 - DNA, 26 bp, Homo sapiens
ggctctggagcaggatagggtcccgg

SEQ ID NO: 19086 - DNA, 26 bp, Homo sapiens
gctctggagcaggatagggtcccgga

SEQ ID NO: 19087 - DNA, 26 bp, Homo sapiens
ctctggagcaggatagggtcccggat

SEQ ID NO: 19088 - DNA, 26 bp, Homo sapiens
tctggagcaggatagggtcccggatt

SEQ ID NO: 19089 - DNA, 26 bp, Homo sapiens
ctggagcaggatagggtcccggattc

SEQ ID NO: 19090 - DNA, 26 bp, Homo sapiens
tggagcaggatagggtcccggattcg

SEQ ID NO: 19091 - DNA, 26 bp, Homo sapiens
ggagcaggatagggtcccggattcga

SEQ ID NO: 19092 - DNA, 26 bp, Homo sapiens
gagcaggatagggtcccggattcgac

SEQ ID NO: 19093 - DNA, 26 bp, Homo sapiens
agcaggatagggtcccggattcgacc

SEQ ID NO: 19094 - DNA, 26 bp, Homo sapiens
gcaggatagggtcccggattcgacct

SEQ ID NO: 19095 - DNA, 26 bp, Homo sapiens
caggatagggtcccggattcgacctc

SEQ ID NO: 19096 - DNA, 26 bp, Homo sapiens
aggatagggtcccggattcgacctcc

SEQ ID NO: 19097 - DNA, 26 bp, Homo sapiens
ggatagggtcccggattcgacctcca

SEQ ID NO: 19098 - DNA, 26 bp, Homo sapiens
gatagggtcccggattcgacctccaa

SEQ ID NO: 19099 - DNA, 26 bp, Homo sapiens
atagggtcccggattcgacctccaag

SEQ ID NO: 19100 - DNA, 26 bp, Homo sapiens
tagggtcccggattcgacctccaagc

SEQ ID NO: 19101 - DNA, 26 bp, Homo sapiens
agggtcccggattcgacctccaagcc

SEQ ID NO: 19102 - DNA, 26 bp, Homo sapiens
gggtcccggattcgacctccaagcca

SEQ ID NO: 19103 - DNA, 26 bp, Homo sapiens
ggtcccggattcgacctccaagccac

SEQ ID NO: 19104 - DNA, 26 bp, Homo sapiens
gtcccggattcgacctccaagccacg

SEQ ID NO: 19105 - DNA, 26 bp, Homo sapiens
tcccggattcgacctccaagccacgc

SEQ ID NO: 19106 - DNA, 26 bp, Homo sapiens
cccggattcgacctccaagccacgcc

SEQ ID NO: 19107 - DNA, 26 bp, Homo sapiens
ccggattcgacctccaagccacgcct

SEQ ID NO: 19108 - DNA, 26 bp, Homo sapiens
cggattcgacctccaagccacgcctt

SEQ ID NO: 19109 - DNA, 26 bp, Homo sapiens
ggattcgacctccaagccacgccttc

SEQ ID NO: 19110 - DNA, 26 bp, Homo sapiens
gattcgacctccaagccacgccttca

SEQ ID NO: 19111 - DNA, 26 bp, Homo sapiens
attcgacctccaagccacgccttcat

SEQ ID NO: 19112 - DNA, 26 bp, Homo sapiens
ttcgacctccaagccacgccttcatt

SEQ ID NO: 19113 - DNA, 26 bp, Homo sapiens
tcgacctccaagccacgccttcattg

SEQ ID NO: 19114 - DNA, 26 bp, Homo sapiens
cgacctccaagccacgccttcattga

SEQ ID NO: 19115 - DNA, 26 bp, Homo sapiens
gacctccaagccacgccttcattgac

SEQ ID NO: 19116 - DNA, 26 bp, Homo sapiens
acctccaagccacgccttcattgaca

SEQ ID NO: 19117 - DNA, 26 bp, Homo sapiens
cctccaagccacgccttcattgacag

SEQ ID NO: 19118 - DNA, 26 bp, Homo sapiens
ctccaagccacgccttcattgacagg

SEQ ID NO: 19119 - DNA, 26 bp, Homo sapiens
tccaagccacgccttcattgacaggt

SEQ ID NO: 19120 - DNA, 26 bp, Homo sapiens
ccaagccacgccttcattgacaggtt

SEQ ID NO: 19121 - DNA, 26 bp, Homo sapiens
caagccacgccttcattgacaggttg

SEQ ID NO: 19122 - DNA, 26 bp, Homo sapiens
aagccacgccttcattgacaggttgg

SEQ ID NO: 19123 - DNA, 26 bp, Homo sapiens
agccacgccttcattgacaggttggc

SEQ ID NO: 19124 - DNA, 26 bp, Homo sapiens
gccacgccttcattgacaggttggca

SEQ ID NO: 19125 - DNA, 26 bp, Homo sapiens
ccacgccttcattgacaggttggcaa

SEQ ID NO: 19126 - DNA, 26 bp, Homo sapiens
cacgccttcattgacaggttggcaaa

SEQ ID NO: 19127 - DNA, 26 bp, Homo sapiens
acgccttcattgacaggttggcaaac

SEQ ID NO: 19128 - DNA, 26 bp, Homo sapiens
cgccttcattgacaggttggcaaacc

SEQ ID NO: 19129 - DNA, 26 bp, Homo sapiens
gccttcattgacaggttggcaaacca

SEQ ID NO: 19130 - DNA, 26 bp, Homo sapiens
ccttcattgacaggttggcaaaccac

SEQ ID NO: 19131 - DNA, 26 bp, Homo sapiens
cttcattgacaggttggcaaaccaca

SEQ ID NO: 19132 - DNA, 26 bp, Homo sapiens
ttcattgacaggttggcaaaccacac

SEQ ID NO: 19133 - DNA, 26 bp, Homo sapiens
tcattgacaggttggcaaaccacacc

SEQ ID NO: 19134 - DNA, 26 bp, Homo sapiens
cattgacaggttggcaaaccacaccc

SEQ ID NO: 19135 - DNA, 26 bp, Homo sapiens
attgacaggttggcaaaccacaccca

SEQ ID NO: 19136 - DNA, 26 bp, Homo sapiens
ttgacaggttggcaaaccacacccag

SEQ ID NO: 19137 - DNA, 26 bp, Homo sapiens
tgacaggttggcaaaccacacccagg

SEQ ID NO: 19138 - DNA, 26 bp, Homo sapiens
gacaggttggcaaaccacacccaggg

SEQ ID NO: 19139 - DNA, 26 bp, Homo sapiens
acaggttggcaaaccacacccagggc

SEQ ID NO: 19140 - DNA, 26 bp, Homo sapiens
caggttggcaaaccacacccagggca

SEQ ID NO: 19141 - DNA, 26 bp, Homo sapiens
aggttggcaaaccacacccagggcac

SEQ ID NO: 19142 - DNA, 26 bp, Homo sapiens
ggttggcaaaccacacccagggcacc

SEQ ID NO: 19143 - DNA, 26 bp, Homo sapiens
gttggcaaaccacacccagggcaccc

SEQ ID NO: 19144 - DNA, 26 bp, Homo sapiens
ttggcaaaccacacccagggcaccca

SEQ ID NO: 19145 - DNA, 26 bp, Homo sapiens
tggcaaaccacacccagggcacccag

SEQ ID NO: 19146 - DNA, 26 bp, Homo sapiens
ggcaaaccacacccagggcacccaga

SEQ ID NO: 19147 - DNA, 26 bp, Homo sapiens
gcaaaccacacccagggcacccagaa

SEQ ID NO: 19148 - DNA, 26 bp, Homo sapiens
caaaccacacccagggcacccagaac

SEQ ID NO: 19149 - DNA, 26 bp, Homo sapiens
aaaccacacccagggcacccagaaca

SEQ ID NO: 19150 - DNA, 26 bp, Homo sapiens
aaccacacccagggcacccagaacat

SEQ ID NO: 19151 - DNA, 26 bp, Homo sapiens
accacacccagggcacccagaacatg

SEQ ID NO: 19152 - DNA, 26 bp, Homo sapiens
ccacacccagggcacccagaacatgt

SEQ ID NO: 19153 - DNA, 26 bp, Homo sapiens
cacacccagggcacccagaacatgtt

SEQ ID NO: 19154 - DNA, 26 bp, Homo sapiens
acacccagggcacccagaacatgttg

SEQ ID NO: 19155 - DNA, 26 bp, Homo sapiens
cacccagggcacccagaacatgttgt

SEQ ID NO: 19156 - DNA, 26 bp, Homo sapiens
acccagggcacccagaacatgttgtg

SEQ ID NO: 19157 - DNA, 26 bp, Homo sapiens
cccagggcacccagaacatgttgtgt

SEQ ID NO: 19158 - DNA, 26 bp, Homo sapiens
ccagggcacccagaacatgttgtgtg

SEQ ID NO: 19159 - DNA, 26 bp, Homo sapiens
cagggcacccagaacatgttgtgtgg

SEQ ID NO: 19160 - DNA, 26 bp, Homo sapiens
agggcacccagaacatgttgtgtggt

SEQ ID NO: 19161 - DNA, 26 bp, Homo sapiens
gggcacccagaacatgttgtgtggta

SEQ ID NO: 19162 - DNA, 26 bp, Homo sapiens
ggcacccagaacatgttgtgtggtag

SEQ ID NO: 19163 - DNA, 26 bp, Homo sapiens
gcacccagaacatgttgtgtggtagg

SEQ ID NO: 19164 - DNA, 26 bp, Homo sapiens
cacccagaacatgttgtgtggtaggc

SEQ ID NO: 19165 - DNA, 26 bp, Homo sapiens
acccagaacatgttgtgtggtaggct

SEQ ID NO: 19166 - DNA, 26 bp, Homo sapiens
cccagaacatgttgtgtggtaggctc

SEQ ID NO: 19167 - DNA, 26 bp, Homo sapiens
ccagaacatgttgtgtggtaggctca

SEQ ID NO: 19168 - DNA, 26 bp, Homo sapiens
cagaacatgttgtgtggtaggctcag

SEQ ID NO: 19169 - DNA, 26 bp, Homo sapiens
agaacatgttgtgtggtaggctcagt

SEQ ID NO: 19170 - DNA, 26 bp, Homo sapiens
gaacatgttgtgtggtaggctcagtt

SEQ ID NO: 19171 - DNA, 26 bp, Homo sapiens
aacatgttgtgtggtaggctcagttt

SEQ ID NO: 19172 - DNA, 26 bp, Homo sapiens
acatgttgtgtggtaggctcagtttc

SEQ ID NO: 19173 - DNA, 26 bp, Homo sapiens
catgttgtgtggtaggctcagtttct

SEQ ID NO: 19174 - DNA, 26 bp, Homo sapiens
atgttgtgtggtaggctcagtttctc

SEQ ID NO: 19175 - DNA, 26 bp, Homo sapiens
tgttgtgtggtaggctcagtttctcc

SEQ ID NO: 19176 - DNA, 26 bp, Homo sapiens
gttgtgtggtaggctcagtttctcca

SEQ ID NO: 19177 - DNA, 26 bp, Homo sapiens
ttgtgtggtaggctcagtttctccaa

SEQ ID NO: 19178 - DNA, 26 bp, Homo sapiens
tgtgtggtaggctcagtttctccaac

SEQ ID NO: 19179 - DNA, 26 bp, Homo sapiens
gtgtggtaggctcagtttctccaact

SEQ ID NO: 19180 - DNA, 26 bp, Homo sapiens
tgtggtaggctcagtttctccaactg

SEQ ID NO: 19181 - DNA, 26 bp, Homo sapiens
gtggtaggctcagtttctccaactgc

SEQ ID NO: 19182 - DNA, 26 bp, Homo sapiens
tggtaggctcagtttctccaactgct

SEQ ID NO: 19183 - DNA, 26 bp, Homo sapiens
ggtaggctcagtttctccaactgctt

SEQ ID NO: 19184 - DNA, 26 bp, Homo sapiens
gtaggctcagtttctccaactgcttg

SEQ ID NO: 19185 - DNA, 26 bp, Homo sapiens
taggctcagtttctccaactgcttgt

SEQ ID NO: 19186 - DNA, 26 bp, Homo sapiens
aggctcagtttctccaactgcttgtg

SEQ ID NO: 19187 - DNA, 26 bp, Homo sapiens
ggctcagtttctccaactgcttgtgt

SEQ ID NO: 19188 - DNA, 26 bp, Homo sapiens
gctcagtttctccaactgcttgtgtt

SEQ ID NO: 19189 - DNA, 26 bp, Homo sapiens
ctcagtttctccaactgcttgtgttc

SEQ ID NO: 19190 - DNA, 26 bp, Homo sapiens
tcagtttctccaactgcttgtgttct

SEQ ID NO: 19191 - DNA, 26 bp, Homo sapiens
cagtttctccaactgcttgtgttctg

SEQ ID NO: 19192 - DNA, 26 bp, Homo sapiens
agtttctccaactgcttgtgttctgc

SEQ ID NO: 19193 - DNA, 26 bp, Homo sapiens
gtttctccaactgcttgtgttctgcc

SEQ ID NO: 19194 - DNA, 26 bp, Homo sapiens
tttctccaactgcttgtgttctgccg

SEQ ID NO: 19195 - DNA, 26 bp, Homo sapiens
ttctccaactgcttgtgttctgccgg

SEQ ID NO: 19196 - DNA, 26 bp, Homo sapiens
tctccaactgcttgtgttctgccgga

SEQ ID NO: 19197 - DNA, 26 bp, Homo sapiens
ctccaactgcttgtgttctgccggag

SEQ ID NO: 19198 - DNA, 26 bp, Homo sapiens
tccaactgcttgtgttctgccggagt

SEQ ID NO: 19199 - DNA, 26 bp, Homo sapiens
ccaactgcttgtgttctgccggagtc

SEQ ID NO: 19200 - DNA, 26 bp, Homo sapiens
caactgcttgtgttctgccggagtca

SEQ ID NO: 19201 - DNA, 26 bp, Homo sapiens
aactgcttgtgttctgccggagtcat

SEQ ID NO: 19202 - DNA, 26 bp, Homo sapiens
actgcttgtgttctgccggagtcata

SEQ ID NO: 19203 - DNA, 26 bp, Homo sapiens
ctgcttgtgttctgccggagtcataa

SEQ ID NO: 19204 - DNA, 26 bp, Homo sapiens
tgcttgtgttctgccggagtcataaa

SEQ ID NO: 19205 - DNA, 26 bp, Homo sapiens
gcttgtgttctgccggagtcataaag

SEQ ID NO: 19206 - DNA, 26 bp, Homo sapiens
cttgtgttctgccggagtcataaagc

SEQ ID NO: 19207 - DNA, 26 bp, Homo sapiens
ttgtgttctgccggagtcataaagcc

SEQ ID NO: 19208 - DNA, 26 bp, Homo sapiens
tgtgttctgccggagtcataaagcct

SEQ ID NO: 19209 - DNA, 26 bp, Homo sapiens
gtgttctgccggagtcataaagcctg

SEQ ID NO: 19210 - DNA, 26 bp, Homo sapiens
tgttctgccggagtcataaagcctgc

SEQ ID NO: 19211 - DNA, 26 bp, Homo sapiens
gttctgccggagtcataaagcctgct

SEQ ID NO: 19212 - DNA, 26 bp, Homo sapiens
ttctgccggagtcataaagcctgctt

SEQ ID NO: 19213 - DNA, 26 bp, Homo sapiens
tctgccggagtcataaagcctgcttg

SEQ ID NO: 19214 - DNA, 26 bp, Homo sapiens
ctgccggagtcataaagcctgcttgc

SEQ ID NO: 19215 - DNA, 26 bp, Homo sapiens
tgccggagtcataaagcctgcttgca

SEQ ID NO: 19216 - DNA, 26 bp, Homo sapiens
gccggagtcataaagcctgcttgcac

SEQ ID NO: 19217 - DNA, 26 bp, Homo sapiens
ccggagtcataaagcctgcttgcacc

SEQ ID NO: 19218 - DNA, 26 bp, Homo sapiens
cggagtcataaagcctgcttgcacca

SEQ ID NO: 19219 - DNA, 26 bp, Homo sapiens
ggagtcataaagcctgcttgcaccag

SEQ ID NO: 19220 - DNA, 26 bp, Homo sapiens
gagtcataaagcctgcttgcaccagg

SEQ ID NO: 19221 - DNA, 26 bp, Homo sapiens
agtcataaagcctgcttgcaccaggt

SEQ ID NO: 19222 - DNA, 26 bp, Homo sapiens
gtcataaagcctgcttgcaccaggtg

SEQ ID NO: 19223 - DNA, 26 bp, Homo sapiens
tcataaagcctgcttgcaccaggtgc

SEQ ID NO: 19224 - DNA, 26 bp, Homo sapiens
cataaagcctgcttgcaccaggtgct

SEQ ID NO: 19225 - DNA, 26 bp, Homo sapiens
ataaagcctgcttgcaccaggtgctg

SEQ ID NO: 19226 - DNA, 26 bp, Homo sapiens
taaagcctgcttgcaccaggtgctgg

SEQ ID NO: 19227 - DNA, 26 bp, Homo sapiens
aaagcctgcttgcaccaggtgctggg

SEQ ID NO: 19228 - DNA, 26 bp, Homo sapiens
aagcctgcttgcaccaggtgctgggc

SEQ ID NO: 19229 - DNA, 26 bp, Homo sapiens
agcctgcttgcaccaggtgctgggcg

SEQ ID NO: 19230 - DNA, 26 bp, Homo sapiens
gcctgcttgcaccaggtgctgggcgc

SEQ ID NO: 19231 - DNA, 26 bp, Homo sapiens
cctgcttgcaccaggtgctgggcgct

SEQ ID NO: 19232 - DNA, 26 bp, Homo sapiens
ctgcttgcaccaggtgctgggcgctg

SEQ ID NO: 19233 - DNA, 26 bp, Homo sapiens
tgcttgcaccaggtgctgggcgctgg

SEQ ID NO: 19234 - DNA, 26 bp, Homo sapiens
gcttgcaccaggtgctgggcgctggg

SEQ ID NO: 19235 - DNA, 26 bp, Homo sapiens
cttgcaccaggtgctgggcgctgggg

SEQ ID NO: 19236 - DNA, 26 bp, Homo sapiens
ttgcaccaggtgctgggcgctgggga

SEQ ID NO: 19237 - DNA, 26 bp, Homo sapiens
tgcaccaggtgctgggcgctggggaa

SEQ ID NO: 19238 - DNA, 26 bp, Homo sapiens
gcaccaggtgctgggcgctggggaag

SEQ ID NO: 19239 - DNA, 26 bp, Homo sapiens
caccaggtgctgggcgctggggaagc

SEQ ID NO: 19240 - DNA, 26 bp, Homo sapiens
accaggtgctgggcgctggggaagcg

SEQ ID NO: 19241 - DNA, 26 bp, Homo sapiens
ccaggtgctgggcgctggggaagcgc

SEQ ID NO: 19242 - DNA, 26 bp, Homo sapiens
caggtgctgggcgctggggaagcgct

SEQ ID NO: 19243 - DNA, 26 bp, Homo sapiens
aggtgctgggcgctggggaagcgctt

SEQ ID NO: 19244 - DNA, 26 bp, Homo sapiens
ggtgctgggcgctggggaagcgcttg

SEQ ID NO: 19245 - DNA, 26 bp, Homo sapiens
gtgctgggcgctggggaagcgcttgt

SEQ ID NO: 19246 - DNA, 26 bp, Homo sapiens
tgctgggcgctggggaagcgcttgta

SEQ ID NO: 19247 - DNA, 26 bp, Homo sapiens
gctgggcgctggggaagcgcttgtag

SEQ ID NO: 19248 - DNA, 26 bp, Homo sapiens
ctgggcgctggggaagcgcttgtaga

SEQ ID NO: 19249 - DNA, 26 bp, Homo sapiens
tgggcgctggggaagcgcttgtagac

SEQ ID NO: 19250 - DNA, 26 bp, Homo sapiens
gggcgctggggaagcgcttgtagact

SEQ ID NO: 19251 - DNA, 26 bp, Homo sapiens
ggcgctggggaagcgcttgtagactg

SEQ ID NO: 19252 - DNA, 26 bp, Homo sapiens
gcgctggggaagcgcttgtagactgc

SEQ ID NO: 19253 - DNA, 26 bp, Homo sapiens
cgctggggaagcgcttgtagactgcg

SEQ ID NO: 19254 - DNA, 26 bp, Homo sapiens
gctggggaagcgcttgtagactgcgg

SEQ ID NO: 19255 - DNA, 26 bp, Homo sapiens
ctggggaagcgcttgtagactgcggt

SEQ ID NO: 19256 - DNA, 26 bp, Homo sapiens
tggggaagcgcttgtagactgcggtg

SEQ ID NO: 19257 - DNA, 26 bp, Homo sapiens
ggggaagcgcttgtagactgcggtgc

SEQ ID NO: 19258 - DNA, 26 bp, Homo sapiens
gggaagcgcttgtagactgcggtgct

SEQ ID NO: 19259 - DNA, 26 bp, Homo sapiens
ggaagcgcttgtagactgcggtgctg

SEQ ID NO: 19260 - DNA, 26 bp, Homo sapiens
gaagcgcttgtagactgcggtgctga

SEQ ID NO: 19261 - DNA, 26 bp, Homo sapiens
aagcgcttgtagactgcggtgctgac

SEQ ID NO: 19262 - DNA, 26 bp, Homo sapiens
agcgcttgtagactgcggtgctgacg

SEQ ID NO: 19263 - DNA, 26 bp, Homo sapiens
gcgcttgtagactgcggtgctgacgc

SEQ ID NO: 19264 - DNA, 26 bp, Homo sapiens
cgcttgtagactgcggtgctgacgct

SEQ ID NO: 19265 - DNA, 26 bp, Homo sapiens
gcttgtagactgcggtgctgacgctg

SEQ ID NO: 19266 - DNA, 26 bp, Homo sapiens
cttgtagactgcggtgctgacgctgc

SEQ ID NO: 19267 - DNA, 26 bp, Homo sapiens
ttgtagactgcggtgctgacgctgcg

SEQ ID NO: 19268 - DNA, 26 bp, Homo sapiens
tgtagactgcggtgctgacgctgcgc

SEQ ID NO: 19269 - DNA, 26 bp, Homo sapiens
gtagactgcggtgctgacgctgcgca

SEQ ID NO: 19270 - DNA, 26 bp, Homo sapiens
tagactgcggtgctgacgctgcgcag

SEQ ID NO: 19271 - DNA, 26 bp, Homo sapiens
agactgcggtgctgacgctgcgcagg

SEQ ID NO: 19272 - DNA, 26 bp, Homo sapiens
gactgcggtgctgacgctgcgcagga

SEQ ID NO: 19273 - DNA, 26 bp, Homo sapiens
actgcggtgctgacgctgcgcaggat

SEQ ID NO: 19274 - DNA, 26 bp, Homo sapiens
ctgcggtgctgacgctgcgcaggatg

SEQ ID NO: 19275 - DNA, 26 bp, Homo sapiens
tgcggtgctgacgctgcgcaggatga

SEQ ID NO: 19276 - DNA, 26 bp, Homo sapiens
gcggtgctgacgctgcgcaggatgag

SEQ ID NO: 19277 - DNA, 26 bp, Homo sapiens
cggtgctgacgctgcgcaggatgagc

SEQ ID NO: 19278 - DNA, 26 bp, Homo sapiens
ggtgctgacgctgcgcaggatgagca

SEQ ID NO: 19279 - DNA, 26 bp, Homo sapiens
gtgctgacgctgcgcaggatgagcac

SEQ ID NO: 19280 - DNA, 26 bp, Homo sapiens
tgctgacgctgcgcaggatgagcacg

SEQ ID NO: 19281 - DNA, 26 bp, Homo sapiens
gctgacgctgcgcaggatgagcacgt

SEQ ID NO: 19282 - DNA, 26 bp, Homo sapiens
ctgacgctgcgcaggatgagcacgtt

SEQ ID NO: 19283 - DNA, 26 bp, Homo sapiens
tgacgctgcgcaggatgagcacgttg

SEQ ID NO: 19284 - DNA, 26 bp, Homo sapiens
gacgctgcgcaggatgagcacgttgc

SEQ ID NO: 19285 - DNA, 26 bp, Homo sapiens
acgctgcgcaggatgagcacgttgcc

SEQ ID NO: 19286 - DNA, 26 bp, Homo sapiens
cgctgcgcaggatgagcacgttgccc

SEQ ID NO: 19287 - DNA, 26 bp, Homo sapiens
gctgcgcaggatgagcacgttgccca

SEQ ID NO: 19288 - DNA, 26 bp, Homo sapiens
ctgcgcaggatgagcacgttgcccag

SEQ ID NO: 19289 - DNA, 26 bp, Homo sapiens
tgcgcaggatgagcacgttgcccagg

SEQ ID NO: 19290 - DNA, 26 bp, Homo sapiens
gcgcaggatgagcacgttgcccaggt

SEQ ID NO: 19291 - DNA, 26 bp, Homo sapiens
cgcaggatgagcacgttgcccaggtt

SEQ ID NO: 19292 - DNA, 26 bp, Homo sapiens
gcaggatgagcacgttgcccaggttg

SEQ ID NO: 19293 - DNA, 26 bp, Homo sapiens
caggatgagcacgttgcccaggttgg

SEQ ID NO: 19294 - DNA, 26 bp, Homo sapiens
aggatgagcacgttgcccaggttggc

SEQ ID NO: 19295 - DNA, 26 bp, Homo sapiens
ggatgagcacgttgcccaggttggcg

SEQ ID NO: 19296 - DNA, 26 bp, Homo sapiens
gatgagcacgttgcccaggttggcgt

SEQ ID NO: 19297 - DNA, 26 bp, Homo sapiens
atgagcacgttgcccaggttggcgta

SEQ ID NO: 19298 - DNA, 26 bp, Homo sapiens
tgagcacgttgcccaggttggcgtag

SEQ ID NO: 19299 - DNA, 26 bp, Homo sapiens
gagcacgttgcccaggttggcgtagc

SEQ ID NO: 19300 - DNA, 26 bp, Homo sapiens
agcacgttgcccaggttggcgtagcg

SEQ ID NO: 19301 - DNA, 26 bp, Homo sapiens
gcacgttgcccaggttggcgtagcgg

SEQ ID NO: 19302 - DNA, 26 bp, Homo sapiens
cacgttgcccaggttggcgtagcgga

SEQ ID NO: 19303 - DNA, 26 bp, Homo sapiens
acgttgcccaggttggcgtagcggat

SEQ ID NO: 19304 - DNA, 26 bp, Homo sapiens
cgttgcccaggttggcgtagcggatg

SEQ ID NO: 19305 - DNA, 26 bp, Homo sapiens
gttgcccaggttggcgtagcggatga

SEQ ID NO: 19306 - DNA, 26 bp, Homo sapiens
ttgcccaggttggcgtagcggatgag

SEQ ID NO: 19307 - DNA, 26 bp, Homo sapiens
tgcccaggttggcgtagcggatgagc

SEQ ID NO: 19308 - DNA, 26 bp, Homo sapiens
gcccaggttggcgtagcggatgagcg

SEQ ID NO: 19309 - DNA, 26 bp, Homo sapiens
cccaggttggcgtagcggatgagcgt

SEQ ID NO: 19310 - DNA, 26 bp, Homo sapiens
ccaggttggcgtagcggatgagcgtg

SEQ ID NO: 19311 - DNA, 26 bp, Homo sapiens
caggttggcgtagcggatgagcgtgc

SEQ ID NO: 19312 - DNA, 26 bp, Homo sapiens
aggttggcgtagcggatgagcgtgcg

SEQ ID NO: 19313 - DNA, 26 bp, Homo sapiens
ggttggcgtagcggatgagcgtgcgc

SEQ ID NO: 19314 - DNA, 26 bp, Homo sapiens
gttggcgtagcggatgagcgtgcgcc

SEQ ID NO: 19315 - DNA, 26 bp, Homo sapiens
ttggcgtagcggatgagcgtgcgccg

SEQ ID NO: 19316 - DNA, 26 bp, Homo sapiens
tggcgtagcggatgagcgtgcgccgc

SEQ ID NO: 19317 - DNA, 26 bp, Homo sapiens
ggcgtagcggatgagcgtgcgccgca

SEQ ID NO: 19318 - DNA, 26 bp, Homo sapiens
gcgtagcggatgagcgtgcgccgcag

SEQ ID NO: 19319 - DNA, 26 bp, Homo sapiens
cgtagcggatgagcgtgcgccgcagc

SEQ ID NO: 19320 - DNA, 26 bp, Homo sapiens
gtagcggatgagcgtgcgccgcagca

SEQ ID NO: 19321 - DNA, 26 bp, Homo sapiens
tagcggatgagcgtgcgccgcagcag

SEQ ID NO: 19322 - DNA, 26 bp, Homo sapiens
agcggatgagcgtgcgccgcagcagc

SEQ ID NO: 19323 - DNA, 26 bp, Homo sapiens
gcggatgagcgtgcgccgcagcagcc

SEQ ID NO: 19324 - DNA, 26 bp, Homo sapiens
cggatgagcgtgcgccgcagcagccg

SEQ ID NO: 19325 - DNA, 26 bp, Homo sapiens
ggatgagcgtgcgccgcagcagccgg

SEQ ID NO: 19326 - DNA, 26 bp, Homo sapiens
gatgagcgtgcgccgcagcagccggc

SEQ ID NO: 19327 - DNA, 26 bp, Homo sapiens
atgagcgtgcgccgcagcagccggcc

SEQ ID NO: 19328 - DNA, 26 bp, Homo sapiens
tgagcgtgcgccgcagcagccggcct

SEQ ID NO: 19329 - DNA, 26 bp, Homo sapiens
gagcgtgcgccgcagcagccggcctt

SEQ ID NO: 19330 - DNA, 26 bp, Homo sapiens
agcgtgcgccgcagcagccggccttg

SEQ ID NO: 19331 - DNA, 26 bp, Homo sapiens
gcgtgcgccgcagcagccggccttgc

SEQ ID NO: 19332 - DNA, 26 bp, Homo sapiens
cgtgcgccgcagcagccggccttgct

SEQ ID NO: 19333 - DNA, 26 bp, Homo sapiens
gtgcgccgcagcagccggccttgctc

SEQ ID NO: 19334 - DNA, 26 bp, Homo sapiens
tgcgccgcagcagccggccttgctcg

SEQ ID NO: 19335 - DNA, 26 bp, Homo sapiens
gcgccgcagcagccggccttgctcgt

SEQ ID NO: 19336 - DNA, 26 bp, Homo sapiens
cgccgcagcagccggccttgctcgtc

SEQ ID NO: 19337 - DNA, 26 bp, Homo sapiens
gccgcagcagccggccttgctcgtcc

SEQ ID NO: 19338 - DNA, 26 bp, Homo sapiens
ccgcagcagccggccttgctcgtcct

SEQ ID NO: 19339 - DNA, 26 bp, Homo sapiens
cgcagcagccggccttgctcgtcctt

SEQ ID NO: 19340 - DNA, 26 bp, Homo sapiens
gcagcagccggccttgctcgtccttg

SEQ ID NO: 19341 - DNA, 26 bp, Homo sapiens
cagcagccggccttgctcgtccttgc

SEQ ID NO: 19342 - DNA, 26 bp, Homo sapiens
agcagccggccttgctcgtccttgcc

SEQ ID NO: 19343 - DNA, 26 bp, Homo sapiens
gcagccggccttgctcgtccttgcct

SEQ ID NO: 19344 - DNA, 26 bp, Homo sapiens
cagccggccttgctcgtccttgcctt

SEQ ID NO: 19345 - DNA, 26 bp, Homo sapiens
agccggccttgctcgtccttgccttc

SEQ ID NO: 19346 - DNA, 26 bp, Homo sapiens
gccggccttgctcgtccttgccttcg

SEQ ID NO: 19347 - DNA, 26 bp, Homo sapiens
ccggccttgctcgtccttgccttcga

SEQ ID NO: 19348 - DNA, 26 bp, Homo sapiens
cggccttgctcgtccttgccttcgac

SEQ ID NO: 19349 - DNA, 26 bp, Homo sapiens
ggccttgctcgtccttgccttcgacg

SEQ ID NO: 19350 - DNA, 26 bp, Homo sapiens
gccttgctcgtccttgccttcgacga

SEQ ID NO: 19351 - DNA, 26 bp, Homo sapiens
ccttgctcgtccttgccttcgacgaa

SEQ ID NO: 19352 - DNA, 26 bp, Homo sapiens
cttgctcgtccttgccttcgacgaag

SEQ ID NO: 19353 - DNA, 26 bp, Homo sapiens
ttgctcgtccttgccttcgacgaagc

SEQ ID NO: 19354 - DNA, 26 bp, Homo sapiens
tgctcgtccttgccttcgacgaagcc

SEQ ID NO: 19355 - DNA, 26 bp, Homo sapiens
gctcgtccttgccttcgacgaagccc

SEQ ID NO: 19356 - DNA, 26 bp, Homo sapiens
ctcgtccttgccttcgacgaagcccg

SEQ ID NO: 19357 - DNA, 26 bp, Homo sapiens
tcgtccttgccttcgacgaagcccga

SEQ ID NO: 19358 - DNA, 26 bp, Homo sapiens
cgtccttgccttcgacgaagcccgac

SEQ ID NO: 19359 - DNA, 26 bp, Homo sapiens
gtccttgccttcgacgaagcccgaca

SEQ ID NO: 19360 - DNA, 26 bp, Homo sapiens
tccttgccttcgacgaagcccgacac

SEQ ID NO: 19361 - DNA, 26 bp, Homo sapiens
ccttgccttcgacgaagcccgacacc

SEQ ID NO: 19362 - DNA, 26 bp, Homo sapiens
cttgccttcgacgaagcccgacacca

SEQ ID NO: 19363 - DNA, 26 bp, Homo sapiens
ttgccttcgacgaagcccgacaccag

SEQ ID NO: 19364 - DNA, 26 bp, Homo sapiens
tgccttcgacgaagcccgacaccagg

SEQ ID NO: 19365 - DNA, 26 bp, Homo sapiens
gccttcgacgaagcccgacaccaggc

SEQ ID NO: 19366 - DNA, 26 bp, Homo sapiens
ccttcgacgaagcccgacaccaggct

SEQ ID NO: 19367 - DNA, 26 bp, Homo sapiens
cttcgacgaagcccgacaccaggctc

SEQ ID NO: 19368 - DNA, 26 bp, Homo sapiens
ttcgacgaagcccgacaccaggctca

SEQ ID NO: 19369 - DNA, 26 bp, Homo sapiens
tcgacgaagcccgacaccaggctcat

SEQ ID NO: 19370 - DNA, 26 bp, Homo sapiens
cgacgaagcccgacaccaggctcatg

SEQ ID NO: 19371 - DNA, 26 bp, Homo sapiens
gacgaagcccgacaccaggctcatga

SEQ ID NO: 19372 - DNA, 26 bp, Homo sapiens
acgaagcccgacaccaggctcatgag

SEQ ID NO: 19373 - DNA, 26 bp, Homo sapiens
cgaagcccgacaccaggctcatgagg

SEQ ID NO: 19374 - DNA, 26 bp, Homo sapiens
gaagcccgacaccaggctcatgaggc

SEQ ID NO: 19375 - DNA, 26 bp, Homo sapiens
aagcccgacaccaggctcatgaggcg

SEQ ID NO: 19376 - DNA, 26 bp, Homo sapiens
agcccgacaccaggctcatgaggcgg

SEQ ID NO: 19377 - DNA, 26 bp, Homo sapiens
gcccgacaccaggctcatgaggcggt

SEQ ID NO: 19378 - DNA, 26 bp, Homo sapiens
cccgacaccaggctcatgaggcggtc

SEQ ID NO: 19379 - DNA, 26 bp, Homo sapiens
ccgacaccaggctcatgaggcggtcg

SEQ ID NO: 19380 - DNA, 26 bp, Homo sapiens
cgacaccaggctcatgaggcggtcgg

SEQ ID NO: 19381 - DNA, 26 bp, Homo sapiens
gacaccaggctcatgaggcggtcggg

SEQ ID NO: 19382 - DNA, 26 bp, Homo sapiens
acaccaggctcatgaggcggtcgggc

SEQ ID NO: 19383 - DNA, 26 bp, Homo sapiens
caccaggctcatgaggcggtcgggcc

SEQ ID NO: 19384 - DNA, 26 bp, Homo sapiens
accaggctcatgaggcggtcgggcca

SEQ ID NO: 19385 - DNA, 26 bp, Homo sapiens
ccaggctcatgaggcggtcgggccac

SEQ ID NO: 19386 - DNA, 26 bp, Homo sapiens
caggctcatgaggcggtcgggccacg

SEQ ID NO: 19387 - DNA, 26 bp, Homo sapiens
aggctcatgaggcggtcgggccacgg

SEQ ID NO: 19388 - DNA, 26 bp, Homo sapiens
ggctcatgaggcggtcgggccacggc

SEQ ID NO: 19389 - DNA, 26 bp, Homo sapiens
gctcatgaggcggtcgggccacggca

SEQ ID NO: 19390 - DNA, 26 bp, Homo sapiens
ctcatgaggcggtcgggccacggcag

SEQ ID NO: 19391 - DNA, 26 bp, Homo sapiens
tcatgaggcggtcgggccacggcagg

SEQ ID NO: 19392 - DNA, 26 bp, Homo sapiens
catgaggcggtcgggccacggcaggt

SEQ ID NO: 19393 - DNA, 26 bp, Homo sapiens
atgaggcggtcgggccacggcaggtt

SEQ ID NO: 19394 - DNA, 26 bp, Homo sapiens
tgaggcggtcgggccacggcaggttc

SEQ ID NO: 19395 - DNA, 26 bp, Homo sapiens
gaggcggtcgggccacggcaggttct

SEQ ID NO: 19396 - DNA, 26 bp, Homo sapiens
aggcggtcgggccacggcaggttctc

SEQ ID NO: 19397 - DNA, 26 bp, Homo sapiens
ggcggtcgggccacggcaggttctcg

SEQ ID NO: 19398 - DNA, 26 bp, Homo sapiens
gcggtcgggccacggcaggttctcgt

SEQ ID NO: 19399 - DNA, 26 bp, Homo sapiens
cggtcgggccacggcaggttctcgta

SEQ ID NO: 19400 - DNA, 26 bp, Homo sapiens
ggtcgggccacggcaggttctcgtac

SEQ ID NO: 19401 - DNA, 26 bp, Homo sapiens
gtcgggccacggcaggttctcgtact

SEQ ID NO: 19402 - DNA, 26 bp, Homo sapiens
tcgggccacggcaggttctcgtactg

SEQ ID NO: 19403 - DNA, 26 bp, Homo sapiens
cgggccacggcaggttctcgtactgg

SEQ ID NO: 19404 - DNA, 26 bp, Homo sapiens
gggccacggcaggttctcgtactggt

SEQ ID NO: 19405 - DNA, 26 bp, Homo sapiens
ggccacggcaggttctcgtactggtt

SEQ ID NO: 19406 - DNA, 26 bp, Homo sapiens
gccacggcaggttctcgtactggttc

SEQ ID NO: 19407 - DNA, 26 bp, Homo sapiens
ccacggcaggttctcgtactggttcc

SEQ ID NO: 19408 - DNA, 26 bp, Homo sapiens
cacggcaggttctcgtactggttcca

SEQ ID NO: 19409 - DNA, 26 bp, Homo sapiens
acggcaggttctcgtactggttccac

SEQ ID NO: 19410 - DNA, 26 bp, Homo sapiens
cggcaggttctcgtactggttccacc

SEQ ID NO: 19411 - DNA, 26 bp, Homo sapiens
ggcaggttctcgtactggttccacca

SEQ ID NO: 19412 - DNA, 26 bp, Homo sapiens
gcaggttctcgtactggttccaccag

SEQ ID NO: 19413 - DNA, 26 bp, Homo sapiens
caggttctcgtactggttccaccagc

SEQ ID NO: 19414 - DNA, 26 bp, Homo sapiens
aggttctcgtactggttccaccagcg

SEQ ID NO: 19415 - DNA, 26 bp, Homo sapiens
ggttctcgtactggttccaccagcgg

SEQ ID NO: 19416 - DNA, 26 bp, Homo sapiens
gttctcgtactggttccaccagcggg

SEQ ID NO: 19417 - DNA, 26 bp, Homo sapiens
ttctcgtactggttccaccagcgggt

SEQ ID NO: 19418 - DNA, 26 bp, Homo sapiens
tctcgtactggttccaccagcgggtc

SEQ ID NO: 19419 - DNA, 26 bp, Homo sapiens
ctcgtactggttccaccagcgggtca

SEQ ID NO: 19420 - DNA, 26 bp, Homo sapiens
tcgtactggttccaccagcgggtcac

SEQ ID NO: 19421 - DNA, 26 bp, Homo sapiens
cgtactggttccaccagcgggtcacg

SEQ ID NO: 19422 - DNA, 26 bp, Homo sapiens
gtactggttccaccagcgggtcacga

SEQ ID NO: 19423 - DNA, 26 bp, Homo sapiens
tactggttccaccagcgggtcacgac

SEQ ID NO: 19424 - DNA, 26 bp, Homo sapiens
actggttccaccagcgggtcacgacc

SEQ ID NO: 19425 - DNA, 26 bp, Homo sapiens
ctggttccaccagcgggtcacgacca

SEQ ID NO: 19426 - DNA, 26 bp, Homo sapiens
tggttccaccagcgggtcacgaccag

SEQ ID NO: 19427 - DNA, 26 bp, Homo sapiens
ggttccaccagcgggtcacgaccagc

SEQ ID NO: 19428 - DNA, 26 bp, Homo sapiens
gttccaccagcgggtcacgaccagcg

SEQ ID NO: 19429 - DNA, 26 bp, Homo sapiens
ttccaccagcgggtcacgaccagcgt

SEQ ID NO: 19430 - DNA, 26 bp, Homo sapiens
tccaccagcgggtcacgaccagcgtc

SEQ ID NO: 19431 - DNA, 26 bp, Homo sapiens
ccaccagcgggtcacgaccagcgtca

SEQ ID NO: 19432 - DNA, 26 bp, Homo sapiens
caccagcgggtcacgaccagcgtcac

SEQ ID NO: 19433 - DNA, 26 bp, Homo sapiens
accagcgggtcacgaccagcgtcacg

SEQ ID NO: 19434 - DNA, 26 bp, Homo sapiens
ccagcgggtcacgaccagcgtcacgt

SEQ ID NO: 19435 - DNA, 26 bp, Homo sapiens
cagcgggtcacgaccagcgtcacgta

SEQ ID NO: 19436 - DNA, 26 bp, Homo sapiens
agcgggtcacgaccagcgtcacgtag

SEQ ID NO: 19437 - DNA, 26 bp, Homo sapiens
gcgggtcacgaccagcgtcacgtaga

SEQ ID NO: 19438 - DNA, 26 bp, Homo sapiens
cgggtcacgaccagcgtcacgtagaa

SEQ ID NO: 19439 - DNA, 26 bp, Homo sapiens
gggtcacgaccagcgtcacgtagaag

SEQ ID NO: 19440 - DNA, 26 bp, Homo sapiens
ggtcacgaccagcgtcacgtagaagc

SEQ ID NO: 19441 - DNA, 26 bp, Homo sapiens
gtcacgaccagcgtcacgtagaagcc

SEQ ID NO: 19442 - DNA, 26 bp, Homo sapiens
tcacgaccagcgtcacgtagaagccc

SEQ ID NO: 19443 - DNA, 26 bp, Homo sapiens
cacgaccagcgtcacgtagaagccca

SEQ ID NO: 19444 - DNA, 26 bp, Homo sapiens
acgaccagcgtcacgtagaagcccag

SEQ ID NO: 19445 - DNA, 26 bp, Homo sapiens
cgaccagcgtcacgtagaagcccagc

SEQ ID NO: 19446 - DNA, 26 bp, Homo sapiens
gaccagcgtcacgtagaagcccagca

SEQ ID NO: 19447 - DNA, 26 bp, Homo sapiens
accagcgtcacgtagaagcccagcac

SEQ ID NO: 19448 - DNA, 26 bp, Homo sapiens
ccagcgtcacgtagaagcccagcacg

SEQ ID NO: 19449 - DNA, 26 bp, Homo sapiens
cagcgtcacgtagaagcccagcacga

SEQ ID NO: 19450 - DNA, 26 bp, Homo sapiens
agcgtcacgtagaagcccagcacgaa

SEQ ID NO: 19451 - DNA, 26 bp, Homo sapiens
gcgtcacgtagaagcccagcacgaag

SEQ ID NO: 19452 - DNA, 26 bp, Homo sapiens
cgtcacgtagaagcccagcacgaagg

SEQ ID NO: 19453 - DNA, 26 bp, Homo sapiens
gtcacgtagaagcccagcacgaagga

SEQ ID NO: 19454 - DNA, 26 bp, Homo sapiens
tcacgtagaagcccagcacgaaggaa

SEQ ID NO: 19455 - DNA, 26 bp, Homo sapiens
cacgtagaagcccagcacgaaggaaa

SEQ ID NO: 19456 - DNA, 26 bp, Homo sapiens
acgtagaagcccagcacgaaggaaat

SEQ ID NO: 19457 - DNA, 26 bp, Homo sapiens
cgtagaagcccagcacgaaggaaatg

SEQ ID NO: 19458 - DNA, 26 bp, Homo sapiens
gtagaagcccagcacgaaggaaatgg

SEQ ID NO: 19459 - DNA, 26 bp, Homo sapiens
tagaagcccagcacgaaggaaatggg

SEQ ID NO: 19460 - DNA, 26 bp, Homo sapiens
agaagcccagcacgaaggaaatgggg

SEQ ID NO: 19461 - DNA, 26 bp, Homo sapiens
gaagcccagcacgaaggaaatgggga

SEQ ID NO: 19462 - DNA, 26 bp, Homo sapiens
aagcccagcacgaaggaaatggggat

SEQ ID NO: 19463 - DNA, 26 bp, Homo sapiens
agcccagcacgaaggaaatggggatg

SEQ ID NO: 19464 - DNA, 26 bp, Homo sapiens
gcccagcacgaaggaaatggggatga

SEQ ID NO: 19465 - DNA, 26 bp, Homo sapiens
cccagcacgaaggaaatggggatgag

SEQ ID NO: 19466 - DNA, 26 bp, Homo sapiens
ccagcacgaaggaaatggggatgagc

SEQ ID NO: 19467 - DNA, 26 bp, Homo sapiens
cagcacgaaggaaatggggatgagct

SEQ ID NO: 19468 - DNA, 26 bp, Homo sapiens
agcacgaaggaaatggggatgagctg

SEQ ID NO: 19469 - DNA, 26 bp, Homo sapiens
gcacgaaggaaatggggatgagctgg

SEQ ID NO: 19470 - DNA, 26 bp, Homo sapiens
cacgaaggaaatggggatgagctgga

SEQ ID NO: 19471 - DNA, 26 bp, Homo sapiens
acgaaggaaatggggatgagctggat

SEQ ID NO: 19472 - DNA, 26 bp, Homo sapiens
cgaaggaaatggggatgagctggatg

SEQ ID NO: 19473 - DNA, 26 bp, Homo sapiens
gaaggaaatggggatgagctggatgt

SEQ ID NO: 19474 - DNA, 26 bp, Homo sapiens
aaggaaatggggatgagctggatgta

SEQ ID NO: 19475 - DNA, 26 bp, Homo sapiens
aggaaatggggatgagctggatgtag

SEQ ID NO: 19476 - DNA, 26 bp, Homo sapiens
ggaaatggggatgagctggatgtagc

SEQ ID NO: 19477 - DNA, 26 bp, Homo sapiens
gaaatggggatgagctggatgtagct

SEQ ID NO: 19478 - DNA, 26 bp, Homo sapiens
aaatggggatgagctggatgtagctg

SEQ ID NO: 19479 - DNA, 26 bp, Homo sapiens
aatggggatgagctggatgtagctgt

SEQ ID NO: 19480 - DNA, 26 bp, Homo sapiens
atggggatgagctggatgtagctgtc

SEQ ID NO: 19481 - DNA, 26 bp, Homo sapiens
tggggatgagctggatgtagctgtcg

SEQ ID NO: 19482 - DNA, 26 bp, Homo sapiens
ggggatgagctggatgtagctgtcgc

SEQ ID NO: 19483 - DNA, 26 bp, Homo sapiens
gggatgagctggatgtagctgtcgca

SEQ ID NO: 19484 - DNA, 26 bp, Homo sapiens
ggatgagctggatgtagctgtcgcaa

SEQ ID NO: 19485 - DNA, 26 bp, Homo sapiens
gatgagctggatgtagctgtcgcaat

SEQ ID NO: 19486 - DNA, 26 bp, Homo sapiens
atgagctggatgtagctgtcgcaata

SEQ ID NO: 19487 - DNA, 26 bp, Homo sapiens
tgagctggatgtagctgtcgcaatac

SEQ ID NO: 19488 - DNA, 26 bp, Homo sapiens
gagctggatgtagctgtcgcaataca

SEQ ID NO: 19489 - DNA, 26 bp, Homo sapiens
agctggatgtagctgtcgcaatacag

SEQ ID NO: 19490 - DNA, 26 bp, Homo sapiens
gctggatgtagctgtcgcaatacaga

SEQ ID NO: 19491 - DNA, 26 bp, Homo sapiens
ctggatgtagctgtcgcaatacagag

SEQ ID NO: 19492 - DNA, 26 bp, Homo sapiens
tggatgtagctgtcgcaatacagagt

SEQ ID NO: 19493 - DNA, 26 bp, Homo sapiens
ggatgtagctgtcgcaatacagagtc

SEQ ID NO: 19494 - DNA, 26 bp, Homo sapiens
gatgtagctgtcgcaatacagagtca

SEQ ID NO: 19495 - DNA, 26 bp, Homo sapiens
atgtagctgtcgcaatacagagtcag

SEQ ID NO: 19496 - DNA, 26 bp, Homo sapiens
tgtagctgtcgcaatacagagtcagt

SEQ ID NO: 19497 - DNA, 26 bp, Homo sapiens
gtagctgtcgcaatacagagtcagtt

SEQ ID NO: 19498 - DNA, 26 bp, Homo sapiens
tagctgtcgcaatacagagtcagttt

SEQ ID NO: 19499 - DNA, 26 bp, Homo sapiens
agctgtcgcaatacagagtcagtttc

SEQ ID NO: 19500 - DNA, 26 bp, Homo sapiens
gctgtcgcaatacagagtcagtttct

SEQ ID NO: 19501 - DNA, 26 bp, Homo sapiens
ctgtcgcaatacagagtcagtttctc

SEQ ID NO: 19502 - DNA, 26 bp, Homo sapiens
tgtcgcaatacagagtcagtttctca

SEQ ID NO: 19503 - DNA, 26 bp, Homo sapiens
gtcgcaatacagagtcagtttctcaa

SEQ ID NO: 19504 - DNA, 26 bp, Homo sapiens
tcgcaatacagagtcagtttctcaaa

SEQ ID NO: 19505 - DNA, 26 bp, Homo sapiens
cgcaatacagagtcagtttctcaaac

SEQ ID NO: 19506 - DNA, 26 bp, Homo sapiens
gcaatacagagtcagtttctcaaaca

SEQ ID NO: 19507 - DNA, 26 bp, Homo sapiens
caatacagagtcagtttctcaaacat

SEQ ID NO: 19508 - DNA, 26 bp, Homo sapiens
aatacagagtcagtttctcaaacatc

SEQ ID NO: 19509 - DNA, 26 bp, Homo sapiens
atacagagtcagtttctcaaacatca

SEQ ID NO: 19510 - DNA, 26 bp, Homo sapiens
tacagagtcagtttctcaaacatcag

SEQ ID NO: 19511 - DNA, 26 bp, Homo sapiens
acagagtcagtttctcaaacatcagc

SEQ ID NO: 19512 - DNA, 26 bp, Homo sapiens
cagagtcagtttctcaaacatcagct

SEQ ID NO: 19513 - DNA, 26 bp, Homo sapiens
agagtcagtttctcaaacatcagctg

SEQ ID NO: 19514 - DNA, 26 bp, Homo sapiens
gagtcagtttctcaaacatcagctgt

SEQ ID NO: 19515 - DNA, 26 bp, Homo sapiens
agtcagtttctcaaacatcagctgtt

SEQ ID NO: 19516 - DNA, 26 bp, Homo sapiens
gtcagtttctcaaacatcagctgttg

SEQ ID NO: 19517 - DNA, 26 bp, Homo sapiens
tcagtttctcaaacatcagctgttgt

SEQ ID NO: 19518 - DNA, 26 bp, Homo sapiens
cagtttctcaaacatcagctgttgtt

SEQ ID NO: 19519 - DNA, 26 bp, Homo sapiens
agtttctcaaacatcagctgttgttc

SEQ ID NO: 19520 - DNA, 26 bp, Homo sapiens
gtttctcaaacatcagctgttgttct

SEQ ID NO: 19521 - DNA, 26 bp, Homo sapiens
tttctcaaacatcagctgttgttctt

SEQ ID NO: 19522 - DNA, 26 bp, Homo sapiens
ttctcaaacatcagctgttgttcttc

SEQ ID NO: 19523 - DNA, 26 bp, Homo sapiens
tctcaaacatcagctgttgttcttcc

SEQ ID NO: 19524 - DNA, 26 bp, Homo sapiens
ctcaaacatcagctgttgttcttccg

SEQ ID NO: 19525 - DNA, 26 bp, Homo sapiens
tcaaacatcagctgttgttcttccgt

SEQ ID NO: 19526 - DNA, 26 bp, Homo sapiens
caaacatcagctgttgttcttccgtg

SEQ ID NO: 19527 - DNA, 26 bp, Homo sapiens
aaacatcagctgttgttcttccgtga

SEQ ID NO: 19528 - DNA, 26 bp, Homo sapiens
aacatcagctgttgttcttccgtgag

SEQ ID NO: 19529 - DNA, 26 bp, Homo sapiens
acatcagctgttgttcttccgtgagg

SEQ ID NO: 19530 - DNA, 26 bp, Homo sapiens
catcagctgttgttcttccgtgaggg

SEQ ID NO: 19531 - DNA, 26 bp, Homo sapiens
atcagctgttgttcttccgtgagggc

SEQ ID NO: 19532 - DNA, 26 bp, Homo sapiens
tcagctgttgttcttccgtgagggcc

SEQ ID NO: 19533 - DNA, 26 bp, Homo sapiens
cagctgttgttcttccgtgagggcca

SEQ ID NO: 19534 - DNA, 26 bp, Homo sapiens
agctgttgttcttccgtgagggccag

SEQ ID NO: 19535 - DNA, 26 bp, Homo sapiens
gctgttgttcttccgtgagggccagc

SEQ ID NO: 19536 - DNA, 26 bp, Homo sapiens
ctgttgttcttccgtgagggccagcc

SEQ ID NO: 19537 - DNA, 26 bp, Homo sapiens
tgttgttcttccgtgagggccagcct

SEQ ID NO: 19538 - DNA, 26 bp, Homo sapiens
gttgttcttccgtgagggccagccta

SEQ ID NO: 19539 - DNA, 26 bp, Homo sapiens
ttgttcttccgtgagggccagcctat

SEQ ID NO: 19540 - DNA, 26 bp, Homo sapiens
tgttcttccgtgagggccagcctata

SEQ ID NO: 19541 - DNA, 26 bp, Homo sapiens
gttcttccgtgagggccagcctataa

SEQ ID NO: 19542 - DNA, 26 bp, Homo sapiens
ttcttccgtgagggccagcctataaa

SEQ ID NO: 19543 - DNA, 26 bp, Homo sapiens
tcttccgtgagggccagcctataaat

SEQ ID NO: 19544 - DNA, 26 bp, Homo sapiens
cttccgtgagggccagcctataaata

SEQ ID NO: 19545 - DNA, 26 bp, Homo sapiens
ttccgtgagggccagcctataaataa

SEQ ID NO: 19546 - DNA, 26 bp, Homo sapiens
tccgtgagggccagcctataaataaa

SEQ ID NO: 19547 - DNA, 26 bp, Homo sapiens
ccgtgagggccagcctataaataaag

SEQ ID NO: 19548 - DNA, 26 bp, Homo sapiens
cgtgagggccagcctataaataaagc

SEQ ID NO: 19549 - DNA, 26 bp, Homo sapiens
gtgagggccagcctataaataaagcg

SEQ ID NO: 19550 - DNA, 26 bp, Homo sapiens
tgagggccagcctataaataaagcgg

SEQ ID NO: 19551 - DNA, 26 bp, Homo sapiens
gagggccagcctataaataaagcgga

SEQ ID NO: 19552 - DNA, 26 bp, Homo sapiens
agggccagcctataaataaagcggat

SEQ ID NO: 19553 - DNA, 26 bp, Homo sapiens
gggccagcctataaataaagcggatg

SEQ ID NO: 19554 - DNA, 26 bp, Homo sapiens
ggccagcctataaataaagcggatga

SEQ ID NO: 19555 - DNA, 26 bp, Homo sapiens
gccagcctataaataaagcggatgat

SEQ ID NO: 19556 - DNA, 26 bp, Homo sapiens
ccagcctataaataaagcggatgatg

SEQ ID NO: 19557 - DNA, 26 bp, Homo sapiens
cagcctataaataaagcggatgatgt

SEQ ID NO: 19558 - DNA, 26 bp, Homo sapiens
agcctataaataaagcggatgatgta

SEQ ID NO: 19559 - DNA, 26 bp, Homo sapiens
gcctataaataaagcggatgatgtag

SEQ ID NO: 19560 - DNA, 26 bp, Homo sapiens
cctataaataaagcggatgatgtagt

SEQ ID NO: 19561 - DNA, 26 bp, Homo sapiens
ctataaataaagcggatgatgtagta

SEQ ID NO: 19562 - DNA, 26 bp, Homo sapiens
tataaataaagcggatgatgtagtag

SEQ ID NO: 19563 - DNA, 26 bp, Homo sapiens
ataaataaagcggatgatgtagtagc

SEQ ID NO: 19564 - DNA, 26 bp, Homo sapiens
taaataaagcggatgatgtagtagca

SEQ ID NO: 19565 - DNA, 26 bp, Homo sapiens
aaataaagcggatgatgtagtagcag

SEQ ID NO: 19566 - DNA, 26 bp, Homo sapiens
aataaagcggatgatgtagtagcaga

SEQ ID NO: 19567 - DNA, 26 bp, Homo sapiens
ataaagcggatgatgtagtagcagag

SEQ ID NO: 19568 - DNA, 26 bp, Homo sapiens
taaagcggatgatgtagtagcagagc

SEQ ID NO: 19569 - DNA, 26 bp, Homo sapiens
aaagcggatgatgtagtagcagagca

SEQ ID NO: 19570 - DNA, 26 bp, Homo sapiens
aagcggatgatgtagtagcagagcag

SEQ ID NO: 19571 - DNA, 26 bp, Homo sapiens
agcggatgatgtagtagcagagcagg

SEQ ID NO: 19572 - DNA, 26 bp, Homo sapiens
gcggatgatgtagtagcagagcagga

SEQ ID NO: 19573 - DNA, 26 bp, Homo sapiens
cggatgatgtagtagcagagcaggaa

SEQ ID NO: 19574 - DNA, 26 bp, Homo sapiens
ggatgatgtagtagcagagcaggaag

SEQ ID NO: 19575 - DNA, 26 bp, Homo sapiens
gatgatgtagtagcagagcaggaaga

SEQ ID NO: 19576 - DNA, 26 bp, Homo sapiens
atgatgtagtagcagagcaggaagat

SEQ ID NO: 19577 - DNA, 26 bp, Homo sapiens
tgatgtagtagcagagcaggaagatt

SEQ ID NO: 19578 - DNA, 26 bp, Homo sapiens
gatgtagtagcagagcaggaagatta

SEQ ID NO: 19579 - DNA, 26 bp, Homo sapiens
atgtagtagcagagcaggaagattaa

SEQ ID NO: 19580 - DNA, 26 bp, Homo sapiens
tgtagtagcagagcaggaagattaag

SEQ ID NO: 19581 - DNA, 26 bp, Homo sapiens
gtagtagcagagcaggaagattaaga

SEQ ID NO: 19582 - DNA, 26 bp, Homo sapiens
tagtagcagagcaggaagattaagaa

SEQ ID NO: 19583 - DNA, 26 bp, Homo sapiens
agtagcagagcaggaagattaagaac

SEQ ID NO: 19584 - DNA, 26 bp, Homo sapiens
gtagcagagcaggaagattaagaact

SEQ ID NO: 19585 - DNA, 26 bp, Homo sapiens
tagcagagcaggaagattaagaactc

SEQ ID NO: 19586 - DNA, 26 bp, Homo sapiens
agcagagcaggaagattaagaactcg

SEQ ID NO: 19587 - DNA, 26 bp, Homo sapiens
gcagagcaggaagattaagaactcgc

SEQ ID NO: 19588 - DNA, 26 bp, Homo sapiens
cagagcaggaagattaagaactcgcc

SEQ ID NO: 19589 - DNA, 26 bp, Homo sapiens
agagcaggaagattaagaactcgcca

SEQ ID NO: 19590 - DNA, 26 bp, Homo sapiens
gagcaggaagattaagaactcgccat

SEQ ID NO: 19591 - DNA, 26 bp, Homo sapiens
agcaggaagattaagaactcgccata

SEQ ID NO: 19592 - DNA, 26 bp, Homo sapiens
gcaggaagattaagaactcgccatat

SEQ ID NO: 19593 - DNA, 26 bp, Homo sapiens
caggaagattaagaactcgccatata

SEQ ID NO: 19594 - DNA, 26 bp, Homo sapiens
aggaagattaagaactcgccatatag

SEQ ID NO: 19595 - DNA, 26 bp, Homo sapiens
ggaagattaagaactcgccatatagc

SEQ ID NO: 19596 - DNA, 26 bp, Homo sapiens
gaagattaagaactcgccatatagca

SEQ ID NO: 19597 - DNA, 26 bp, Homo sapiens
aagattaagaactcgccatatagcag

SEQ ID NO: 19598 - DNA, 26 bp, Homo sapiens
agattaagaactcgccatatagcagc

SEQ ID NO: 19599 - DNA, 26 bp, Homo sapiens
gattaagaactcgccatatagcagct

SEQ ID NO: 19600 - DNA, 26 bp, Homo sapiens
attaagaactcgccatatagcagctt

SEQ ID NO: 19601 - DNA, 26 bp, Homo sapiens
ttaagaactcgccatatagcagcttg

SEQ ID NO: 19602 - DNA, 26 bp, Homo sapiens
taagaactcgccatatagcagcttgt

SEQ ID NO: 19603 - DNA, 26 bp, Homo sapiens
aagaactcgccatatagcagcttgta

SEQ ID NO: 19604 - DNA, 26 bp, Homo sapiens
agaactcgccatatagcagcttgtag

SEQ ID NO: 19605 - DNA, 26 bp, Homo sapiens
gaactcgccatatagcagcttgtaga

SEQ ID NO: 19606 - DNA, 26 bp, Homo sapiens
aactcgccatatagcagcttgtagat

SEQ ID NO: 19607 - DNA, 26 bp, Homo sapiens
actcgccatatagcagcttgtagatg

SEQ ID NO: 19608 - DNA, 26 bp, Homo sapiens
ctcgccatatagcagcttgtagatgc

SEQ ID NO: 19609 - DNA, 26 bp, Homo sapiens
tcgccatatagcagcttgtagatgct

SEQ ID NO: 19610 - DNA, 26 bp, Homo sapiens
cgccatatagcagcttgtagatgctg

SEQ ID NO: 19611 - DNA, 26 bp, Homo sapiens
gccatatagcagcttgtagatgctgc

SEQ ID NO: 19612 - DNA, 26 bp, Homo sapiens
ccatatagcagcttgtagatgctgcc

SEQ ID NO: 19613 - DNA, 26 bp, Homo sapiens
catatagcagcttgtagatgctgccc

SEQ ID NO: 19614 - DNA, 26 bp, Homo sapiens
atatagcagcttgtagatgctgcccc

SEQ ID NO: 19615 - DNA, 26 bp, Homo sapiens
tatagcagcttgtagatgctgccccg

SEQ ID NO: 19616 - DNA, 26 bp, Homo sapiens
atagcagcttgtagatgctgccccgc

SEQ ID NO: 19617 - DNA, 26 bp, Homo sapiens
tagcagcttgtagatgctgccccgcc

SEQ ID NO: 19618 - DNA, 26 bp, Homo sapiens
agcagcttgtagatgctgccccgcca

SEQ ID NO: 19619 - DNA, 26 bp, Homo sapiens
gcagcttgtagatgctgccccgccag

SEQ ID NO: 19620 - DNA, 26 bp, Homo sapiens
cagcttgtagatgctgccccgccagc

SEQ ID NO: 19621 - DNA, 26 bp, Homo sapiens
agcttgtagatgctgccccgccagca

SEQ ID NO: 19622 - DNA, 26 bp, Homo sapiens
gcttgtagatgctgccccgccagcac

SEQ ID NO: 19623 - DNA, 26 bp, Homo sapiens
cttgtagatgctgccccgccagcaca

SEQ ID NO: 19624 - DNA, 26 bp, Homo sapiens
ttgtagatgctgccccgccagcacag

SEQ ID NO: 19625 - DNA, 26 bp, Homo sapiens
tgtagatgctgccccgccagcacagc

SEQ ID NO: 19626 - DNA, 26 bp, Homo sapiens
gtagatgctgccccgccagcacagca

SEQ ID NO: 19627 - DNA, 26 bp, Homo sapiens
tagatgctgccccgccagcacagcag

SEQ ID NO: 19628 - DNA, 26 bp, Homo sapiens
agatgctgccccgccagcacagcagc

SEQ ID NO: 19629 - DNA, 26 bp, Homo sapiens
gatgctgccccgccagcacagcagca

SEQ ID NO: 19630 - DNA, 26 bp, Homo sapiens
atgctgccccgccagcacagcagcag

SEQ ID NO: 19631 - DNA, 26 bp, Homo sapiens
tgctgccccgccagcacagcagcagg

SEQ ID NO: 19632 - DNA, 26 bp, Homo sapiens
gctgccccgccagcacagcagcaggc

SEQ ID NO: 19633 - DNA, 26 bp, Homo sapiens
ctgccccgccagcacagcagcaggcg

SEQ ID NO: 19634 - DNA, 26 bp, Homo sapiens
tgccccgccagcacagcagcaggcgg

SEQ ID NO: 19635 - DNA, 26 bp, Homo sapiens
gccccgccagcacagcagcaggcggg

SEQ ID NO: 19636 - DNA, 26 bp, Homo sapiens
ccccgccagcacagcagcaggcggga

SEQ ID NO: 19637 - DNA, 26 bp, Homo sapiens
cccgccagcacagcagcaggcgggag

SEQ ID NO: 19638 - DNA, 26 bp, Homo sapiens
ccgccagcacagcagcaggcgggaga

SEQ ID NO: 19639 - DNA, 26 bp, Homo sapiens
cgccagcacagcagcaggcgggagaa

SEQ ID NO: 19640 - DNA, 26 bp, Homo sapiens
gccagcacagcagcaggcgggagaag

SEQ ID NO: 19641 - DNA, 26 bp, Homo sapiens
ccagcacagcagcaggcgggagaagg

SEQ ID NO: 19642 - DNA, 26 bp, Homo sapiens
cagcacagcagcaggcgggagaagga

SEQ ID NO: 19643 - DNA, 26 bp, Homo sapiens
agcacagcagcaggcgggagaaggag

SEQ ID NO: 19644 - DNA, 26 bp, Homo sapiens
gcacagcagcaggcgggagaaggagc

SEQ ID NO: 19645 - DNA, 26 bp, Homo sapiens
cacagcagcaggcgggagaaggagcc

SEQ ID NO: 19646 - DNA, 26 bp, Homo sapiens
acagcagcaggcgggagaaggagcct

SEQ ID NO: 19647 - DNA, 26 bp, Homo sapiens
cagcagcaggcgggagaaggagccta

SEQ ID NO: 19648 - DNA, 26 bp, Homo sapiens
agcagcaggcgggagaaggagcctaa

SEQ ID NO: 19649 - DNA, 26 bp, Homo sapiens
gcagcaggcgggagaaggagcctaag

SEQ ID NO: 19650 - DNA, 26 bp, Homo sapiens
cagcaggcgggagaaggagcctaagc

SEQ ID NO: 19651 - DNA, 26 bp, Homo sapiens
agcaggcgggagaaggagcctaagcg

SEQ ID NO: 19652 - DNA, 26 bp, Homo sapiens
gcaggcgggagaaggagcctaagcgg

SEQ ID NO: 19653 - DNA, 26 bp, Homo sapiens
caggcgggagaaggagcctaagcggg

SEQ ID NO: 19654 - DNA, 26 bp, Homo sapiens
aggcgggagaaggagcctaagcgggc

SEQ ID NO: 19655 - DNA, 26 bp, Homo sapiens
ggcgggagaaggagcctaagcgggca

SEQ ID NO: 19656 - DNA, 26 bp, Homo sapiens
gcgggagaaggagcctaagcgggcat

SEQ ID NO: 19657 - DNA, 26 bp, Homo sapiens
cgggagaaggagcctaagcgggcatt

SEQ ID NO: 19658 - DNA, 26 bp, Homo sapiens
gggagaaggagcctaagcgggcatta

SEQ ID NO: 19659 - DNA, 26 bp, Homo sapiens
ggagaaggagcctaagcgggcattag

SEQ ID NO: 19660 - DNA, 26 bp, Homo sapiens
gagaaggagcctaagcgggcattagc

SEQ ID NO: 19661 - DNA, 26 bp, Homo sapiens
agaaggagcctaagcgggcattagcc

SEQ ID NO: 19662 - DNA, 26 bp, Homo sapiens
gaaggagcctaagcgggcattagcca

SEQ ID NO: 19663 - DNA, 26 bp, Homo sapiens
aaggagcctaagcgggcattagccac

SEQ ID NO: 19664 - DNA, 26 bp, Homo sapiens
aggagcctaagcgggcattagccact

SEQ ID NO: 19665 - DNA, 26 bp, Homo sapiens
ggagcctaagcgggcattagccactt

SEQ ID NO: 19666 - DNA, 26 bp, Homo sapiens
gagcctaagcgggcattagccacttg

SEQ ID NO: 19667 - DNA, 26 bp, Homo sapiens
agcctaagcgggcattagccacttgg

SEQ ID NO: 19668 - DNA, 26 bp, Homo sapiens
gcctaagcgggcattagccacttggc

SEQ ID NO: 19669 - DNA, 26 bp, Homo sapiens
cctaagcgggcattagccacttggct

SEQ ID NO: 19670 - DNA, 26 bp, Homo sapiens
ctaagcgggcattagccacttggctt

SEQ ID NO: 19671 - DNA, 26 bp, Homo sapiens
taagcgggcattagccacttggcttg

SEQ ID NO: 19672 - DNA, 26 bp, Homo sapiens
aagcgggcattagccacttggcttgt

SEQ ID NO: 19673 - DNA, 26 bp, Homo sapiens
agcgggcattagccacttggcttgtg

SEQ ID NO: 19674 - DNA, 26 bp, Homo sapiens
gcgggcattagccacttggcttgtgt

SEQ ID NO: 19675 - DNA, 26 bp, Homo sapiens
cgggcattagccacttggcttgtgta

SEQ ID NO: 19676 - DNA, 26 bp, Homo sapiens
gggcattagccacttggcttgtgtaa

SEQ ID NO: 19677 - DNA, 26 bp, Homo sapiens
ggcattagccacttggcttgtgtaag

SEQ ID NO: 19678 - DNA, 26 bp, Homo sapiens
gcattagccacttggcttgtgtaagt

SEQ ID NO: 19679 - DNA, 26 bp, Homo sapiens
cattagccacttggcttgtgtaagtg

SEQ ID NO: 19680 - DNA, 26 bp, Homo sapiens
attagccacttggcttgtgtaagtga

SEQ ID NO: 19681 - DNA, 26 bp, Homo sapiens
ttagccacttggcttgtgtaagtgat

SEQ ID NO: 19682 - DNA, 26 bp, Homo sapiens
tagccacttggcttgtgtaagtgatg

SEQ ID NO: 19683 - DNA, 26 bp, Homo sapiens
agccacttggcttgtgtaagtgatgg

SEQ ID NO: 19684 - DNA, 26 bp, Homo sapiens
gccacttggcttgtgtaagtgatggt

SEQ ID NO: 19685 - DNA, 26 bp, Homo sapiens
ccacttggcttgtgtaagtgatggtc

SEQ ID NO: 19686 - DNA, 26 bp, Homo sapiens
cacttggcttgtgtaagtgatggtca

SEQ ID NO: 19687 - DNA, 26 bp, Homo sapiens
acttggcttgtgtaagtgatggtcat

SEQ ID NO: 19688 - DNA, 26 bp, Homo sapiens
cttggcttgtgtaagtgatggtcatg

SEQ ID NO: 19689 - DNA, 26 bp, Homo sapiens
ttggcttgtgtaagtgatggtcatgg

SEQ ID NO: 19690 - DNA, 26 bp, Homo sapiens
tggcttgtgtaagtgatggtcatggc

SEQ ID NO: 19691 - DNA, 26 bp, Homo sapiens
ggcttgtgtaagtgatggtcatggcc

SEQ ID NO: 19692 - DNA, 26 bp, Homo sapiens
gcttgtgtaagtgatggtcatggcca

SEQ ID NO: 19693 - DNA, 26 bp, Homo sapiens
cttgtgtaagtgatggtcatggccag

SEQ ID NO: 19694 - DNA, 26 bp, Homo sapiens
ttgtgtaagtgatggtcatggccagg

SEQ ID NO: 19695 - DNA, 26 bp, Homo sapiens
tgtgtaagtgatggtcatggccaggc

SEQ ID NO: 19696 - DNA, 26 bp, Homo sapiens
gtgtaagtgatggtcatggccaggca

SEQ ID NO: 19697 - DNA, 26 bp, Homo sapiens
tgtaagtgatggtcatggccaggcag

SEQ ID NO: 19698 - DNA, 26 bp, Homo sapiens
gtaagtgatggtcatggccaggcagt

SEQ ID NO: 19699 - DNA, 26 bp, Homo sapiens
taagtgatggtcatggccaggcagtg

SEQ ID NO: 19700 - DNA, 26 bp, Homo sapiens
aagtgatggtcatggccaggcagtgg

SEQ ID NO: 19701 - DNA, 26 bp, Homo sapiens
agtgatggtcatggccaggcagtggg

SEQ ID NO: 19702 - DNA, 26 bp, Homo sapiens
gtgatggtcatggccaggcagtgggc

SEQ ID NO: 19703 - DNA, 26 bp, Homo sapiens
tgatggtcatggccaggcagtgggct

SEQ ID NO: 19704 - DNA, 26 bp, Homo sapiens
gatggtcatggccaggcagtgggctg

SEQ ID NO: 19705 - DNA, 26 bp, Homo sapiens
atggtcatggccaggcagtgggctgc

SEQ ID NO: 19706 - DNA, 26 bp, Homo sapiens
tggtcatggccaggcagtgggctgca

SEQ ID NO: 19707 - DNA, 26 bp, Homo sapiens
ggtcatggccaggcagtgggctgcag

SEQ ID NO: 19708 - DNA, 26 bp, Homo sapiens
gtcatggccaggcagtgggctgcagc

SEQ ID NO: 19709 - DNA, 26 bp, Homo sapiens
tcatggccaggcagtgggctgcagca

SEQ ID NO: 19710 - DNA, 26 bp, Homo sapiens
catggccaggcagtgggctgcagcag

SEQ ID NO: 19711 - DNA, 26 bp, Homo sapiens
atggccaggcagtgggctgcagcagg

SEQ ID NO: 19712 - DNA, 26 bp, Homo sapiens
tggccaggcagtgggctgcagcaggt

SEQ ID NO: 19713 - DNA, 26 bp, Homo sapiens
ggccaggcagtgggctgcagcaggtg

SEQ ID NO: 19714 - DNA, 26 bp, Homo sapiens
gccaggcagtgggctgcagcaggtgg

SEQ ID NO: 19715 - DNA, 26 bp, Homo sapiens
ccaggcagtgggctgcagcaggtggg

SEQ ID NO: 19716 - DNA, 26 bp, Homo sapiens
caggcagtgggctgcagcaggtgggc

SEQ ID NO: 19717 - DNA, 26 bp, Homo sapiens
aggcagtgggctgcagcaggtgggct

SEQ ID NO: 19718 - DNA, 26 bp, Homo sapiens
ggcagtgggctgcagcaggtgggctt

SEQ ID NO: 19719 - DNA, 26 bp, Homo sapiens
gcagtgggctgcagcaggtgggcttg

SEQ ID NO: 19720 - DNA, 26 bp, Homo sapiens
cagtgggctgcagcaggtgggcttgg

SEQ ID NO: 19721 - DNA, 26 bp, Homo sapiens
agtgggctgcagcaggtgggcttggg

SEQ ID NO: 19722 - DNA, 26 bp, Homo sapiens
gtgggctgcagcaggtgggcttgggt

SEQ ID NO: 19723 - DNA, 26 bp, Homo sapiens
tgggctgcagcaggtgggcttgggtc

SEQ ID NO: 19724 - DNA, 26 bp, Homo sapiens
gggctgcagcaggtgggcttgggtca

SEQ ID NO: 19725 - DNA, 26 bp, Homo sapiens
ggctgcagcaggtgggcttgggtcag

SEQ ID NO: 19726 - DNA, 26 bp, Homo sapiens
gctgcagcaggtgggcttgggtcagg

SEQ ID NO: 19727 - DNA, 26 bp, Homo sapiens
ctgcagcaggtgggcttgggtcaggt

SEQ ID NO: 19728 - DNA, 26 bp, Homo sapiens
tgcagcaggtgggcttgggtcaggtg

SEQ ID NO: 19729 - DNA, 26 bp, Homo sapiens
gcagcaggtgggcttgggtcaggtgg

SEQ ID NO: 19730 - DNA, 26 bp, Homo sapiens
cagcaggtgggcttgggtcaggtggg

SEQ ID NO: 19731 - DNA, 26 bp, Homo sapiens
agcaggtgggcttgggtcaggtgggg

SEQ ID NO: 19732 - DNA, 26 bp, Homo sapiens
gcaggtgggcttgggtcaggtggggt

SEQ ID NO: 19733 - DNA, 26 bp, Homo sapiens
caggtgggcttgggtcaggtggggtt

SEQ ID NO: 19734 - DNA, 26 bp, Homo sapiens
aggtgggcttgggtcaggtggggttc

SEQ ID NO: 19735 - DNA, 26 bp, Homo sapiens
ggtgggcttgggtcaggtggggttcc

SEQ ID NO: 19736 - DNA, 26 bp, Homo sapiens
gtgggcttgggtcaggtggggttcca

SEQ ID NO: 19737 - DNA, 26 bp, Homo sapiens
tgggcttgggtcaggtggggttccag

SEQ ID NO: 19738 - DNA, 26 bp, Homo sapiens
gggcttgggtcaggtggggttccagg

SEQ ID NO: 19739 - DNA, 26 bp, Homo sapiens
ggcttgggtcaggtggggttccaggt

SEQ ID NO: 19740 - DNA, 26 bp, Homo sapiens
gcttgggtcaggtggggttccaggtg

SEQ ID NO: 19741 - DNA, 26 bp, Homo sapiens
cttgggtcaggtggggttccaggtgg

SEQ ID NO: 19742 - DNA, 26 bp, Homo sapiens
ttgggtcaggtggggttccaggtggg

SEQ ID NO: 19743 - DNA, 26 bp, Homo sapiens
tgggtcaggtggggttccaggtgggt

SEQ ID NO: 19744 - DNA, 26 bp, Homo sapiens
gggtcaggtggggttccaggtgggtc

SEQ ID NO: 19745 - DNA, 26 bp, Homo sapiens
ggtcaggtggggttccaggtgggtcc

SEQ ID NO: 19746 - DNA, 26 bp, Homo sapiens
gtcaggtggggttccaggtgggtccg

SEQ ID NO: 19747 - DNA, 26 bp, Homo sapiens
tcaggtggggttccaggtgggtccga

SEQ ID NO: 19748 - DNA, 26 bp, Homo sapiens
caggtggggttccaggtgggtccgat

SEQ ID NO: 19749 - DNA, 26 bp, Homo sapiens
aggtggggttccaggtgggtccgatg

SEQ ID NO: 19750 - DNA, 26 bp, Homo sapiens
ggtggggttccaggtgggtccgatga

SEQ ID NO: 19751 - DNA, 26 bp, Homo sapiens
gtggggttccaggtgggtccgatgat

SEQ ID NO: 19752 - DNA, 26 bp, Homo sapiens
tggggttccaggtgggtccgatgatc

SEQ ID NO: 19753 - DNA, 26 bp, Homo sapiens
ggggttccaggtgggtccgatgatcc

SEQ ID NO: 19754 - DNA, 26 bp, Homo sapiens
gggttccaggtgggtccgatgatccc

SEQ ID NO: 19755 - DNA, 26 bp, Homo sapiens
ggttccaggtgggtccgatgatccca

SEQ ID NO: 19756 - DNA, 26 bp, Homo sapiens
gttccaggtgggtccgatgatcccac

SEQ ID NO: 19757 - DNA, 26 bp, Homo sapiens
ttccaggtgggtccgatgatcccaca

SEQ ID NO: 19758 - DNA, 26 bp, Homo sapiens
tccaggtgggtccgatgatcccacag

SEQ ID NO: 19759 - DNA, 26 bp, Homo sapiens
ccaggtgggtccgatgatcccacaga

SEQ ID NO: 19760 - DNA, 26 bp, Homo sapiens
caggtgggtccgatgatcccacagaa

SEQ ID NO: 19761 - DNA, 26 bp, Homo sapiens
aggtgggtccgatgatcccacagaag

SEQ ID NO: 19762 - DNA, 26 bp, Homo sapiens
ggtgggtccgatgatcccacagaagg

SEQ ID NO: 19763 - DNA, 26 bp, Homo sapiens
gtgggtccgatgatcccacagaaggt

SEQ ID NO: 19764 - DNA, 26 bp, Homo sapiens
tgggtccgatgatcccacagaaggtc

SEQ ID NO: 19765 - DNA, 26 bp, Homo sapiens
gggtccgatgatcccacagaaggtct

SEQ ID NO: 19766 - DNA, 26 bp, Homo sapiens
ggtccgatgatcccacagaaggtctg

SEQ ID NO: 19767 - DNA, 26 bp, Homo sapiens
gtccgatgatcccacagaaggtctgg

SEQ ID NO: 19768 - DNA, 26 bp, Homo sapiens
tccgatgatcccacagaaggtctggc

SEQ ID NO: 19769 - DNA, 26 bp, Homo sapiens
ccgatgatcccacagaaggtctggcg

SEQ ID NO: 19770 - DNA, 26 bp, Homo sapiens
cgatgatcccacagaaggtctggcga

SEQ ID NO: 19771 - DNA, 26 bp, Homo sapiens
gatgatcccacagaaggtctggcgac

SEQ ID NO: 19772 - DNA, 26 bp, Homo sapiens
atgatcccacagaaggtctggcgact

SEQ ID NO: 19773 - DNA, 26 bp, Homo sapiens
tgatcccacagaaggtctggcgacta

SEQ ID NO: 19774 - DNA, 26 bp, Homo sapiens
gatcccacagaaggtctggcgactag

SEQ ID NO: 19775 - DNA, 26 bp, Homo sapiens
atcccacagaaggtctggcgactagg

SEQ ID NO: 19776 - DNA, 26 bp, Homo sapiens
tcccacagaaggtctggcgactaggc

SEQ ID NO: 19777 - DNA, 26 bp, Homo sapiens
cccacagaaggtctggcgactaggct

SEQ ID NO: 19778 - DNA, 26 bp, Homo sapiens
ccacagaaggtctggcgactaggctg

SEQ ID NO: 19779 - DNA, 26 bp, Homo sapiens
cacagaaggtctggcgactaggctgg

SEQ ID NO: 19780 - DNA, 26 bp, Homo sapiens
acagaaggtctggcgactaggctggt

SEQ ID NO: 19781 - DNA, 26 bp, Homo sapiens
cagaaggtctggcgactaggctggtg

SEQ ID NO: 19782 - DNA, 26 bp, Homo sapiens
agaaggtctggcgactaggctggtgg

SEQ ID NO: 19783 - DNA, 26 bp, Homo sapiens
gaaggtctggcgactaggctggtggg

SEQ ID NO: 19784 - DNA, 26 bp, Homo sapiens
aaggtctggcgactaggctggtggga

SEQ ID NO: 19785 - DNA, 26 bp, Homo sapiens
aggtctggcgactaggctggtgggac

SEQ ID NO: 19786 - DNA, 26 bp, Homo sapiens
ggtctggcgactaggctggtgggact

SEQ ID NO: 19787 - DNA, 26 bp, Homo sapiens
gtctggcgactaggctggtgggactc

SEQ ID NO: 19788 - DNA, 26 bp, Homo sapiens
tctggcgactaggctggtgggactcc

SEQ ID NO: 19789 - DNA, 26 bp, Homo sapiens
ctggcgactaggctggtgggactccc

SEQ ID NO: 19790 - DNA, 26 bp, Homo sapiens
tggcgactaggctggtgggactccct

SEQ ID NO: 19791 - DNA, 26 bp, Homo sapiens
ggcgactaggctggtgggactccctg

SEQ ID NO: 19792 - DNA, 26 bp, Homo sapiens
gcgactaggctggtgggactccctgg

SEQ ID NO: 19793 - DNA, 26 bp, Homo sapiens
cgactaggctggtgggactccctggg

SEQ ID NO: 19794 - DNA, 26 bp, Homo sapiens
gactaggctggtgggactccctggga

SEQ ID NO: 19795 - DNA, 26 bp, Homo sapiens
actaggctggtgggactccctgggac

SEQ ID NO: 19796 - DNA, 26 bp, Homo sapiens
ctaggctggtgggactccctgggact

SEQ ID NO: 19797 - DNA, 26 bp, Homo sapiens
taggctggtgggactccctgggactc

SEQ ID NO: 19798 - DNA, 26 bp, Homo sapiens
aggctggtgggactccctgggactct

SEQ ID NO: 19799 - DNA, 26 bp, Homo sapiens
ggctggtgggactccctgggactctg

SEQ ID NO: 19800 - DNA, 26 bp, Homo sapiens
gctggtgggactccctgggactctgt

SEQ ID NO: 19801 - DNA, 26 bp, Homo sapiens
tgagttctctgtgactgcacttatct

SEQ ID NO: 19802 - DNA, 26 bp, Homo sapiens
gagttctctgtgactgcacttatctt

SEQ ID NO: 19803 - DNA, 26 bp, Homo sapiens
agttctctgtgactgcacttatcttt

SEQ ID NO: 19804 - DNA, 26 bp, Homo sapiens
gttctctgtgactgcacttatctttt

SEQ ID NO: 19805 - DNA, 26 bp, Homo sapiens
ttctctgtgactgcacttatctttta

SEQ ID NO: 19806 - DNA, 26 bp, Homo sapiens
tctctgtgactgcacttatcttttat

SEQ ID NO: 19807 - DNA, 26 bp, Homo sapiens
ctctgtgactgcacttatcttttatt

SEQ ID NO: 19808 - DNA, 26 bp, Homo sapiens
tctgtgactgcacttatcttttattg

SEQ ID NO: 19809 - DNA, 26 bp, Homo sapiens
ctgtgactgcacttatcttttattgc

SEQ ID NO: 19810 - DNA, 26 bp, Homo sapiens
tgtgactgcacttatcttttattgcc

SEQ ID NO: 19811 - DNA, 26 bp, Homo sapiens
gtgactgcacttatcttttattgccc

SEQ ID NO: 19812 - DNA, 26 bp, Homo sapiens
tgactgcacttatcttttattgccca

SEQ ID NO: 19813 - DNA, 26 bp, Homo sapiens
gactgcacttatcttttattgcccaa

SEQ ID NO: 19814 - DNA, 26 bp, Homo sapiens
actgcacttatcttttattgcccaat

SEQ ID NO: 19815 - DNA, 26 bp, Homo sapiens
ctgcacttatcttttattgcccaata

SEQ ID NO: 19816 - DNA, 26 bp, Homo sapiens
tgcacttatcttttattgcccaataa

SEQ ID NO: 19817 - DNA, 26 bp, Homo sapiens
gcacttatcttttattgcccaataaa

SEQ ID NO: 19818 - DNA, 26 bp, Homo sapiens
cacttatcttttattgcccaataaac

SEQ ID NO: 19819 - DNA, 26 bp, Homo sapiens
acttatcttttattgcccaataaaca

SEQ ID NO: 19820 - DNA, 26 bp, Homo sapiens
cttatcttttattgcccaataaacat

SEQ ID NO: 19821 - DNA, 26 bp, Homo sapiens
ttatcttttattgcccaataaacatt

SEQ ID NO: 19822 - DNA, 26 bp, Homo sapiens
tatcttttattgcccaataaacattg

SEQ ID NO: 19823 - DNA, 26 bp, Homo sapiens
atcttttattgcccaataaacattgg

SEQ ID NO: 19824 - DNA, 26 bp, Homo sapiens
tcttttattgcccaataaacattggg

SEQ ID NO: 19825 - DNA, 26 bp, Homo sapiens
cttttattgcccaataaacattggga

SEQ ID NO: 19826 - DNA, 26 bp, Homo sapiens
ttttattgcccaataaacattgggaa

SEQ ID NO: 19827 - DNA, 26 bp, Homo sapiens
tttattgcccaataaacattgggaag

SEQ ID NO: 19828 - DNA, 26 bp, Homo sapiens
ttattgcccaataaacattgggaaga

SEQ ID NO: 19829 - DNA, 26 bp, Homo sapiens
tattgcccaataaacattgggaagac

SEQ ID NO: 19830 - DNA, 26 bp, Homo sapiens
attgcccaataaacattgggaagaca

SEQ ID NO: 19831 - DNA, 26 bp, Homo sapiens
ttgcccaataaacattgggaagacat

SEQ ID NO: 19832 - DNA, 26 bp, Homo sapiens
tgcccaataaacattgggaagacata

SEQ ID NO: 19833 - DNA, 26 bp, Homo sapiens
gcccaataaacattgggaagacatag

SEQ ID NO: 19834 - DNA, 26 bp, Homo sapiens
cccaataaacattgggaagacatagc

SEQ ID NO: 19835 - DNA, 26 bp, Homo sapiens
ccaataaacattgggaagacatagca

SEQ ID NO: 19836 - DNA, 26 bp, Homo sapiens
caataaacattgggaagacatagcag

SEQ ID NO: 19837 - DNA, 26 bp, Homo sapiens
aataaacattgggaagacatagcagg

SEQ ID NO: 19838 - DNA, 26 bp, Homo sapiens
ataaacattgggaagacatagcaggc

SEQ ID NO: 19839 - DNA, 26 bp, Homo sapiens
taaacattgggaagacatagcaggcc

SEQ ID NO: 19840 - DNA, 26 bp, Homo sapiens
aaacattgggaagacatagcaggcca

SEQ ID NO: 19841 - DNA, 26 bp, Homo sapiens
aacattgggaagacatagcaggccag

SEQ ID NO: 19842 - DNA, 26 bp, Homo sapiens
acattgggaagacatagcaggccaga

SEQ ID NO: 19843 - DNA, 26 bp, Homo sapiens
cattgggaagacatagcaggccagaa

SEQ ID NO: 19844 - DNA, 26 bp, Homo sapiens
attgggaagacatagcaggccagaaa

SEQ ID NO: 19845 - DNA, 26 bp, Homo sapiens
ttgggaagacatagcaggccagaaag

SEQ ID NO: 19846 - DNA, 26 bp, Homo sapiens
tgggaagacatagcaggccagaaagg

SEQ ID NO: 19847 - DNA, 26 bp, Homo sapiens
gggaagacatagcaggccagaaaggc

SEQ ID NO: 19848 - DNA, 26 bp, Homo sapiens
ggaagacatagcaggccagaaaggcc

SEQ ID NO: 19849 - DNA, 26 bp, Homo sapiens
gaagacatagcaggccagaaaggcct

SEQ ID NO: 19850 - DNA, 26 bp, Homo sapiens
aagacatagcaggccagaaaggcctg

SEQ ID NO: 19851 - DNA, 26 bp, Homo sapiens
agacatagcaggccagaaaggcctgt

SEQ ID NO: 19852 - DNA, 26 bp, Homo sapiens
gacatagcaggccagaaaggcctgtc

SEQ ID NO: 19853 - DNA, 26 bp, Homo sapiens
acatagcaggccagaaaggcctgtcc

SEQ ID NO: 19854 - DNA, 26 bp, Homo sapiens
catagcaggccagaaaggcctgtccc

SEQ ID NO: 19855 - DNA, 26 bp, Homo sapiens
atagcaggccagaaaggcctgtcccc

SEQ ID NO: 19856 - DNA, 26 bp, Homo sapiens
tagcaggccagaaaggcctgtcccca

SEQ ID NO: 19857 - DNA, 26 bp, Homo sapiens
agcaggccagaaaggcctgtccccag

SEQ ID NO: 19858 - DNA, 26 bp, Homo sapiens
gcaggccagaaaggcctgtccccaga

SEQ ID NO: 19859 - DNA, 26 bp, Homo sapiens
caggccagaaaggcctgtccccagac

SEQ ID NO: 19860 - DNA, 26 bp, Homo sapiens
aggccagaaaggcctgtccccagaca

SEQ ID NO: 19861 - DNA, 26 bp, Homo sapiens
ggccagaaaggcctgtccccagacat

SEQ ID NO: 19862 - DNA, 26 bp, Homo sapiens
gccagaaaggcctgtccccagacatt

SEQ ID NO: 19863 - DNA, 26 bp, Homo sapiens
ccagaaaggcctgtccccagacattg

SEQ ID NO: 19864 - DNA, 26 bp, Homo sapiens
cagaaaggcctgtccccagacattgt

SEQ ID NO: 19865 - DNA, 26 bp, Homo sapiens
agaaaggcctgtccccagacattgtt

SEQ ID NO: 19866 - DNA, 26 bp, Homo sapiens
gaaaggcctgtccccagacattgttt

SEQ ID NO: 19867 - DNA, 26 bp, Homo sapiens
aaaggcctgtccccagacattgtttc

SEQ ID NO: 19868 - DNA, 26 bp, Homo sapiens
aaggcctgtccccagacattgtttct

SEQ ID NO: 19869 - DNA, 26 bp, Homo sapiens
aggcctgtccccagacattgtttctt

SEQ ID NO: 19870 - DNA, 26 bp, Homo sapiens
ggcctgtccccagacattgtttcttg

SEQ ID NO: 19871 - DNA, 26 bp, Homo sapiens
gcctgtccccagacattgtttcttga

SEQ ID NO: 19872 - DNA, 26 bp, Homo sapiens
cctgtccccagacattgtttcttgag

SEQ ID NO: 19873 - DNA, 26 bp, Homo sapiens
ctgtccccagacattgtttcttgagg

SEQ ID NO: 19874 - DNA, 26 bp, Homo sapiens
tgtccccagacattgtttcttgaggc

SEQ ID NO: 19875 - DNA, 26 bp, Homo sapiens
gtccccagacattgtttcttgaggcc

SEQ ID NO: 19876 - DNA, 26 bp, Homo sapiens
tccccagacattgtttcttgaggcca

SEQ ID NO: 19877 - DNA, 26 bp, Homo sapiens
ccccagacattgtttcttgaggccac

SEQ ID NO: 19878 - DNA, 26 bp, Homo sapiens
cccagacattgtttcttgaggccacc

SEQ ID NO: 19879 - DNA, 26 bp, Homo sapiens
ccagacattgtttcttgaggccaccc

SEQ ID NO: 19880 - DNA, 26 bp, Homo sapiens
cagacattgtttcttgaggccaccct

SEQ ID NO: 19881 - DNA, 26 bp, Homo sapiens
agacattgtttcttgaggccaccctc

SEQ ID NO: 19882 - DNA, 26 bp, Homo sapiens
gacattgtttcttgaggccaccctcc

SEQ ID NO: 19883 - DNA, 26 bp, Homo sapiens
acattgtttcttgaggccaccctcct

SEQ ID NO: 19884 - DNA, 26 bp, Homo sapiens
cattgtttcttgaggccaccctcctt

SEQ ID NO: 19885 - DNA, 26 bp, Homo sapiens
attgtttcttgaggccaccctccttt

SEQ ID NO: 19886 - DNA, 26 bp, Homo sapiens
ttgtttcttgaggccaccctcctttt

SEQ ID NO: 19887 - DNA, 26 bp, Homo sapiens
tgtttcttgaggccaccctcctttta

SEQ ID NO: 19888 - DNA, 26 bp, Homo sapiens
gtttcttgaggccaccctccttttac

SEQ ID NO: 19889 - DNA, 26 bp, Homo sapiens
tttcttgaggccaccctccttttacc

SEQ ID NO: 19890 - DNA, 26 bp, Homo sapiens
ttcttgaggccaccctccttttaccc

SEQ ID NO: 19891 - DNA, 26 bp, Homo sapiens
tcttgaggccaccctccttttacccc

SEQ ID NO: 19892 - DNA, 26 bp, Homo sapiens
cttgaggccaccctccttttacccca

SEQ ID NO: 19893 - DNA, 26 bp, Homo sapiens
ttgaggccaccctccttttaccccaa

SEQ ID NO: 19894 - DNA, 26 bp, Homo sapiens
tgaggccaccctccttttaccccaaa

SEQ ID NO: 19895 - DNA, 26 bp, Homo sapiens
gaggccaccctccttttaccccaaag

SEQ ID NO: 19896 - DNA, 26 bp, Homo sapiens
aggccaccctccttttaccccaaaga

SEQ ID NO: 19897 - DNA, 26 bp, Homo sapiens
ggccaccctccttttaccccaaagat

SEQ ID NO: 19898 - DNA, 26 bp, Homo sapiens
gccaccctccttttaccccaaagatc

SEQ ID NO: 19899 - DNA, 26 bp, Homo sapiens
ccaccctccttttaccccaaagatcc

SEQ ID NO: 19900 - DNA, 26 bp, Homo sapiens
caccctccttttaccccaaagatcca

SEQ ID NO: 19901 - DNA, 26 bp, Homo sapiens
accctccttttaccccaaagatccag

SEQ ID NO: 19902 - DNA, 26 bp, Homo sapiens
ccctccttttaccccaaagatccagg

SEQ ID NO: 19903 - DNA, 26 bp, Homo sapiens
cctccttttaccccaaagatccaggg

SEQ ID NO: 19904 - DNA, 26 bp, Homo sapiens
ctccttttaccccaaagatccagggg

SEQ ID NO: 19905 - DNA, 26 bp, Homo sapiens
tccttttaccccaaagatccaggggc

SEQ ID NO: 19906 - DNA, 26 bp, Homo sapiens
ccttttaccccaaagatccaggggct

SEQ ID NO: 19907 - DNA, 26 bp, Homo sapiens
cttttaccccaaagatccaggggctt

SEQ ID NO: 19908 - DNA, 26 bp, Homo sapiens
ttttaccccaaagatccaggggcttc

SEQ ID NO: 19909 - DNA, 26 bp, Homo sapiens
tttaccccaaagatccaggggcttcc

SEQ ID NO: 19910 - DNA, 26 bp, Homo sapiens
ttaccccaaagatccaggggcttcct

SEQ ID NO: 19911 - DNA, 26 bp, Homo sapiens
taccccaaagatccaggggcttcctt

SEQ ID NO: 19912 - DNA, 26 bp, Homo sapiens
accccaaagatccaggggcttccttc

SEQ ID NO: 19913 - DNA, 26 bp, Homo sapiens
ccccaaagatccaggggcttccttca

SEQ ID NO: 19914 - DNA, 26 bp, Homo sapiens
cccaaagatccaggggcttccttcag

SEQ ID NO: 19915 - DNA, 26 bp, Homo sapiens
ccaaagatccaggggcttccttcagg

SEQ ID NO: 19916 - DNA, 26 bp, Homo sapiens
caaagatccaggggcttccttcagga

SEQ ID NO: 19917 - DNA, 26 bp, Homo sapiens
aaagatccaggggcttccttcaggag

SEQ ID NO: 19918 - DNA, 26 bp, Homo sapiens
aagatccaggggcttccttcaggagc

SEQ ID NO: 19919 - DNA, 26 bp, Homo sapiens
agatccaggggcttccttcaggagcc

SEQ ID NO: 19920 - DNA, 26 bp, Homo sapiens
gatccaggggcttccttcaggagccc

SEQ ID NO: 19921 - DNA, 26 bp, Homo sapiens
atccaggggcttccttcaggagccct

SEQ ID NO: 19922 - DNA, 26 bp, Homo sapiens
tccaggggcttccttcaggagccctg

SEQ ID NO: 19923 - DNA, 26 bp, Homo sapiens
ccaggggcttccttcaggagccctgt

SEQ ID NO: 19924 - DNA, 26 bp, Homo sapiens
caggggcttccttcaggagccctgtg

SEQ ID NO: 19925 - DNA, 26 bp, Homo sapiens
aggggcttccttcaggagccctgtgg

SEQ ID NO: 19926 - DNA, 26 bp, Homo sapiens
ggggcttccttcaggagccctgtgga

SEQ ID NO: 19927 - DNA, 26 bp, Homo sapiens
gggcttccttcaggagccctgtggac

SEQ ID NO: 19928 - DNA, 26 bp, Homo sapiens
ggcttccttcaggagccctgtggacc

SEQ ID NO: 19929 - DNA, 26 bp, Homo sapiens
gcttccttcaggagccctgtggacca

SEQ ID NO: 19930 - DNA, 26 bp, Homo sapiens
cttccttcaggagccctgtggaccag

SEQ ID NO: 19931 - DNA, 26 bp, Homo sapiens
ttccttcaggagccctgtggaccagt

SEQ ID NO: 19932 - DNA, 26 bp, Homo sapiens
tccttcaggagccctgtggaccagtc

SEQ ID NO: 19933 - DNA, 26 bp, Homo sapiens
ccttcaggagccctgtggaccagtct

SEQ ID NO: 19934 - DNA, 26 bp, Homo sapiens
cttcaggagccctgtggaccagtctg

SEQ ID NO: 19935 - DNA, 26 bp, Homo sapiens
ttcaggagccctgtggaccagtctgt

SEQ ID NO: 19936 - DNA, 26 bp, Homo sapiens
tcaggagccctgtggaccagtctgtg

SEQ ID NO: 19937 - DNA, 26 bp, Homo sapiens
caggagccctgtggaccagtctgtgc

SEQ ID NO: 19938 - DNA, 26 bp, Homo sapiens
aggagccctgtggaccagtctgtgca

SEQ ID NO: 19939 - DNA, 26 bp, Homo sapiens
ggagccctgtggaccagtctgtgcaa

SEQ ID NO: 19940 - DNA, 26 bp, Homo sapiens
gagccctgtggaccagtctgtgcaac

SEQ ID NO: 19941 - DNA, 26 bp, Homo sapiens
agccctgtggaccagtctgtgcaaca

SEQ ID NO: 19942 - DNA, 26 bp, Homo sapiens
gccctgtggaccagtctgtgcaacac

SEQ ID NO: 19943 - DNA, 26 bp, Homo sapiens
ccctgtggaccagtctgtgcaacacc

SEQ ID NO: 19944 - DNA, 26 bp, Homo sapiens
cctgtggaccagtctgtgcaacaccc

SEQ ID NO: 19945 - DNA, 26 bp, Homo sapiens
ctgtggaccagtctgtgcaacaccca

SEQ ID NO: 19946 - DNA, 26 bp, Homo sapiens
tgtggaccagtctgtgcaacacccac

SEQ ID NO: 19947 - DNA, 26 bp, Homo sapiens
gtggaccagtctgtgcaacacccact

SEQ ID NO: 19948 - DNA, 26 bp, Homo sapiens
tggaccagtctgtgcaacacccactc

SEQ ID NO: 19949 - DNA, 26 bp, Homo sapiens
ggaccagtctgtgcaacacccactca

SEQ ID NO: 19950 - DNA, 26 bp, Homo sapiens
gaccagtctgtgcaacacccactcag

SEQ ID NO: 19951 - DNA, 26 bp, Homo sapiens
accagtctgtgcaacacccactcagg

SEQ ID NO: 19952 - DNA, 26 bp, Homo sapiens
ccagtctgtgcaacacccactcagga

SEQ ID NO: 19953 - DNA, 26 bp, Homo sapiens
cagtctgtgcaacacccactcaggac

SEQ ID NO: 19954 - DNA, 26 bp, Homo sapiens
agtctgtgcaacacccactcaggact

SEQ ID NO: 19955 - DNA, 26 bp, Homo sapiens
gtctgtgcaacacccactcaggactg

SEQ ID NO: 19956 - DNA, 26 bp, Homo sapiens
tctgtgcaacacccactcaggactgc

SEQ ID NO: 19957 - DNA, 26 bp, Homo sapiens
ctgtgcaacacccactcaggactgcc

SEQ ID NO: 19958 - DNA, 26 bp, Homo sapiens
tgtgcaacacccactcaggactgccc

SEQ ID NO: 19959 - DNA, 26 bp, Homo sapiens
gtgcaacacccactcaggactgcccg

SEQ ID NO: 19960 - DNA, 26 bp, Homo sapiens
tgcaacacccactcaggactgcccga

SEQ ID NO: 19961 - DNA, 26 bp, Homo sapiens
gcaacacccactcaggactgcccgac

SEQ ID NO: 19962 - DNA, 26 bp, Homo sapiens
caacacccactcaggactgcccgaca

SEQ ID NO: 19963 - DNA, 26 bp, Homo sapiens
aacacccactcaggactgcccgacaa

SEQ ID NO: 19964 - DNA, 26 bp, Homo sapiens
acacccactcaggactgcccgacaac

SEQ ID NO: 19965 - DNA, 26 bp, Homo sapiens
cacccactcaggactgcccgacaact

SEQ ID NO: 19966 - DNA, 26 bp, Homo sapiens
acccactcaggactgcccgacaactg

SEQ ID NO: 19967 - DNA, 26 bp, Homo sapiens
cccactcaggactgcccgacaactgc

SEQ ID NO: 19968 - DNA, 26 bp, Homo sapiens
ccactcaggactgcccgacaactgcc

SEQ ID NO: 19969 - DNA, 26 bp, Homo sapiens
cactcaggactgcccgacaactgccc

SEQ ID NO: 19970 - DNA, 26 bp, Homo sapiens
actcaggactgcccgacaactgccct

SEQ ID NO: 19971 - DNA, 26 bp, Homo sapiens
ctcaggactgcccgacaactgccctg

SEQ ID NO: 19972 - DNA, 26 bp, Homo sapiens
tcaggactgcccgacaactgccctgc

SEQ ID NO: 19973 - DNA, 26 bp, Homo sapiens
caggactgcccgacaactgccctgct

SEQ ID NO: 19974 - DNA, 26 bp, Homo sapiens
aggactgcccgacaactgccctgctg

SEQ ID NO: 19975 - DNA, 26 bp, Homo sapiens
ggactgcccgacaactgccctgctga

SEQ ID NO: 19976 - DNA, 26 bp, Homo sapiens
gactgcccgacaactgccctgctgat

SEQ ID NO: 19977 - DNA, 26 bp, Homo sapiens
actgcccgacaactgccctgctgatc

SEQ ID NO: 19978 - DNA, 26 bp, Homo sapiens
ctgcccgacaactgccctgctgatcc

SEQ ID NO: 19979 - DNA, 26 bp, Homo sapiens
tgcccgacaactgccctgctgatccc

SEQ ID NO: 19980 - DNA, 26 bp, Homo sapiens
gcccgacaactgccctgctgatcccc

SEQ ID NO: 19981 - DNA, 26 bp, Homo sapiens
cccgacaactgccctgctgatccccc

SEQ ID NO: 19982 - DNA, 26 bp, Homo sapiens
ccgacaactgccctgctgatccccca

SEQ ID NO: 19983 - DNA, 26 bp, Homo sapiens
cgacaactgccctgctgatcccccat

SEQ ID NO: 19984 - DNA, 26 bp, Homo sapiens
gacaactgccctgctgatcccccatc

SEQ ID NO: 19985 - DNA, 26 bp, Homo sapiens
acaactgccctgctgatcccccatcg

SEQ ID NO: 19986 - DNA, 26 bp, Homo sapiens
caactgccctgctgatcccccatcgc

SEQ ID NO: 19987 - DNA, 26 bp, Homo sapiens
aactgccctgctgatcccccatcgca

SEQ ID NO: 19988 - DNA, 26 bp, Homo sapiens
actgccctgctgatcccccatcgcag

SEQ ID NO: 19989 - DNA, 26 bp, Homo sapiens
ctgccctgctgatcccccatcgcagc

SEQ ID NO: 19990 - DNA, 26 bp, Homo sapiens
tgccctgctgatcccccatcgcagca

SEQ ID NO: 19991 - DNA, 26 bp, Homo sapiens
gccctgctgatcccccatcgcagcac

SEQ ID NO: 19992 - DNA, 26 bp, Homo sapiens
ccctgctgatcccccatcgcagcaca

SEQ ID NO: 19993 - DNA, 26 bp, Homo sapiens
cctgctgatcccccatcgcagcacag

SEQ ID NO: 19994 - DNA, 26 bp, Homo sapiens
ctgctgatcccccatcgcagcacagg

SEQ ID NO: 19995 - DNA, 26 bp, Homo sapiens
tgctgatcccccatcgcagcacagga

SEQ ID NO: 19996 - DNA, 26 bp, Homo sapiens
gctgatcccccatcgcagcacaggag

SEQ ID NO: 19997 - DNA, 26 bp, Homo sapiens
ctgatcccccatcgcagcacaggaga

SEQ ID NO: 19998 - DNA, 26 bp, Homo sapiens
tgatcccccatcgcagcacaggagac

SEQ ID NO: 19999 - DNA, 26 bp, Homo sapiens
gatcccccatcgcagcacaggagaca

SEQ ID NO: 20000 - DNA, 26 bp, Homo sapiens
atcccccatcgcagcacaggagacac

SEQ ID NO: 20001 - DNA, 26 bp, Homo sapiens
tcccccatcgcagcacaggagacaca

SEQ ID NO: 20002 - DNA, 26 bp, Homo sapiens
cccccatcgcagcacaggagacacac

SEQ ID NO: 20003 - DNA, 26 bp, Homo sapiens
ccccatcgcagcacaggagacacact

SEQ ID NO: 20004 - DNA, 26 bp, Homo sapiens
cccatcgcagcacaggagacacactt

SEQ ID NO: 20005 - DNA, 26 bp, Homo sapiens
ccatcgcagcacaggagacacacttg

SEQ ID NO: 20006 - DNA, 26 bp, Homo sapiens
catcgcagcacaggagacacacttgt

SEQ ID NO: 20007 - DNA, 26 bp, Homo sapiens
atcgcagcacaggagacacacttgtc

SEQ ID NO: 20008 - DNA, 26 bp, Homo sapiens
tcgcagcacaggagacacacttgtca

SEQ ID NO: 20009 - DNA, 26 bp, Homo sapiens
cgcagcacaggagacacacttgtcac

SEQ ID NO: 20010 - DNA, 26 bp, Homo sapiens
gcagcacaggagacacacttgtcaca

SEQ ID NO: 20011 - DNA, 26 bp, Homo sapiens
cagcacaggagacacacttgtcacac

SEQ ID NO: 20012 - DNA, 26 bp, Homo sapiens
agcacaggagacacacttgtcacaca

SEQ ID NO: 20013 - DNA, 26 bp, Homo sapiens
gcacaggagacacacttgtcacacat

SEQ ID NO: 20014 - DNA, 26 bp, Homo sapiens
cacaggagacacacttgtcacacata

SEQ ID NO: 20015 - DNA, 26 bp, Homo sapiens
acaggagacacacttgtcacacatac

SEQ ID NO: 20016 - DNA, 26 bp, Homo sapiens
caggagacacacttgtcacacataca

SEQ ID NO: 20017 - DNA, 26 bp, Homo sapiens
aggagacacacttgtcacacatacat

SEQ ID NO: 20018 - DNA, 26 bp, Homo sapiens
ggagacacacttgtcacacatacatc

SEQ ID NO: 20019 - DNA, 26 bp, Homo sapiens
gagacacacttgtcacacatacatcc

SEQ ID NO: 20020 - DNA, 26 bp, Homo sapiens
agacacacttgtcacacatacatcca

SEQ ID NO: 20021 - DNA, 26 bp, Homo sapiens
gacacacttgtcacacatacatccaa

SEQ ID NO: 20022 - DNA, 26 bp, Homo sapiens
acacacttgtcacacatacatccaac

SEQ ID NO: 20023 - DNA, 26 bp, Homo sapiens
cacacttgtcacacatacatccaaca

SEQ ID NO: 20024 - DNA, 26 bp, Homo sapiens
acacttgtcacacatacatccaacag

SEQ ID NO: 20025 - DNA, 26 bp, Homo sapiens
cacttgtcacacatacatccaacagt

SEQ ID NO: 20026 - DNA, 26 bp, Homo sapiens
acttgtcacacatacatccaacagta

SEQ ID NO: 20027 - DNA, 26 bp, Homo sapiens
cttgtcacacatacatccaacagtag

SEQ ID NO: 20028 - DNA, 26 bp, Homo sapiens
ttgtcacacatacatccaacagtagg

SEQ ID NO: 20029 - DNA, 26 bp, Homo sapiens
tgtcacacatacatccaacagtaggg

SEQ ID NO: 20030 - DNA, 26 bp, Homo sapiens
gtcacacatacatccaacagtaggga

SEQ ID NO: 20031 - DNA, 26 bp, Homo sapiens
tcacacatacatccaacagtagggag

SEQ ID NO: 20032 - DNA, 26 bp, Homo sapiens
cacacatacatccaacagtagggagg

SEQ ID NO: 20033 - DNA, 26 bp, Homo sapiens
acacatacatccaacagtagggaggg

SEQ ID NO: 20034 - DNA, 26 bp, Homo sapiens
cacatacatccaacagtagggagggg

SEQ ID NO: 20035 - DNA, 26 bp, Homo sapiens
acatacatccaacagtagggaggggt

SEQ ID NO: 20036 - DNA, 26 bp, Homo sapiens
catacatccaacagtagggaggggtt

SEQ ID NO: 20037 - DNA, 26 bp, Homo sapiens
atacatccaacagtagggaggggttt

SEQ ID NO: 20038 - DNA, 26 bp, Homo sapiens
tacatccaacagtagggaggggtttc

SEQ ID NO: 20039 - DNA, 26 bp, Homo sapiens
acatccaacagtagggaggggtttcc

SEQ ID NO: 20040 - DNA, 26 bp, Homo sapiens
catccaacagtagggaggggtttccc

SEQ ID NO: 20041 - DNA, 26 bp, Homo sapiens
atccaacagtagggaggggtttcccc

SEQ ID NO: 20042 - DNA, 26 bp, Homo sapiens
tccaacagtagggaggggtttcccca

SEQ ID NO: 20043 - DNA, 26 bp, Homo sapiens
ccaacagtagggaggggtttccccaa

SEQ ID NO: 20044 - DNA, 26 bp, Homo sapiens
caacagtagggaggggtttccccaac

SEQ ID NO: 20045 - DNA, 26 bp, Homo sapiens
aacagtagggaggggtttccccaact

SEQ ID NO: 20046 - DNA, 26 bp, Homo sapiens
acagtagggaggggtttccccaactt

SEQ ID NO: 20047 - DNA, 26 bp, Homo sapiens
cagtagggaggggtttccccaacttc

SEQ ID NO: 20048 - DNA, 26 bp, Homo sapiens
agtagggaggggtttccccaacttcc

SEQ ID NO: 20049 - DNA, 26 bp, Homo sapiens
gtagggaggggtttccccaacttccc

SEQ ID NO: 20050 - DNA, 26 bp, Homo sapiens
tagggaggggtttccccaacttccct

SEQ ID NO: 20051 - DNA, 26 bp, Homo sapiens
agggaggggtttccccaacttccctc

SEQ ID NO: 20052 - DNA, 26 bp, Homo sapiens
gggaggggtttccccaacttccctcc

SEQ ID NO: 20053 - DNA, 26 bp, Homo sapiens
ggaggggtttccccaacttccctcca

SEQ ID NO: 20054 - DNA, 26 bp, Homo sapiens
gaggggtttccccaacttccctccag

SEQ ID NO: 20055 - DNA, 26 bp, Homo sapiens
aggggtttccccaacttccctccagg

SEQ ID NO: 20056 - DNA, 26 bp, Homo sapiens
ggggtttccccaacttccctccaggc

SEQ ID NO: 20057 - DNA, 26 bp, Homo sapiens
gggtttccccaacttccctccaggct

SEQ ID NO: 20058 - DNA, 26 bp, Homo sapiens
ggtttccccaacttccctccaggctc

SEQ ID NO: 20059 - DNA, 26 bp, Homo sapiens
gtttccccaacttccctccaggctcc

SEQ ID NO: 20060 - DNA, 26 bp, Homo sapiens
tttccccaacttccctccaggctcct

SEQ ID NO: 20061 - DNA, 26 bp, Homo sapiens
ttccccaacttccctccaggctcctg

SEQ ID NO: 20062 - DNA, 26 bp, Homo sapiens
tccccaacttccctccaggctcctgg

SEQ ID NO: 20063 - DNA, 26 bp, Homo sapiens
ccccaacttccctccaggctcctggc

SEQ ID NO: 20064 - DNA, 26 bp, Homo sapiens
cccaacttccctccaggctcctggca

SEQ ID NO: 20065 - DNA, 26 bp, Homo sapiens
ccaacttccctccaggctcctggcac

SEQ ID NO: 20066 - DNA, 26 bp, Homo sapiens
caacttccctccaggctcctggcacg

SEQ ID NO: 20067 - DNA, 26 bp, Homo sapiens
aacttccctccaggctcctggcacgg

SEQ ID NO: 20068 - DNA, 26 bp, Homo sapiens
acttccctccaggctcctggcacggg

SEQ ID NO: 20069 - DNA, 26 bp, Homo sapiens
cttccctccaggctcctggcacgggg

SEQ ID NO: 20070 - DNA, 26 bp, Homo sapiens
ttccctccaggctcctggcacggggc

SEQ ID NO: 20071 - DNA, 26 bp, Homo sapiens
tccctccaggctcctggcacggggct

SEQ ID NO: 20072 - DNA, 26 bp, Homo sapiens
ccctccaggctcctggcacggggctg

SEQ ID NO: 20073 - DNA, 26 bp, Homo sapiens
cctccaggctcctggcacggggctgg

SEQ ID NO: 20074 - DNA, 26 bp, Homo sapiens
ctccaggctcctggcacggggctggc

SEQ ID NO: 20075 - DNA, 26 bp, Homo sapiens
tccaggctcctggcacggggctggca

SEQ ID NO: 20076 - DNA, 26 bp, Homo sapiens
ccaggctcctggcacggggctggcat

SEQ ID NO: 20077 - DNA, 26 bp, Homo sapiens
caggctcctggcacggggctggcatc

SEQ ID NO: 20078 - DNA, 26 bp, Homo sapiens
aggctcctggcacggggctggcatcc

SEQ ID NO: 20079 - DNA, 26 bp, Homo sapiens
ggctcctggcacggggctggcatccg

SEQ ID NO: 20080 - DNA, 26 bp, Homo sapiens
gctcctggcacggggctggcatccgg

SEQ ID NO: 20081 - DNA, 26 bp, Homo sapiens
ctcctggcacggggctggcatccggt

SEQ ID NO: 20082 - DNA, 26 bp, Homo sapiens
tcctggcacggggctggcatccggtt

SEQ ID NO: 20083 - DNA, 26 bp, Homo sapiens
cctggcacggggctggcatccggttg

SEQ ID NO: 20084 - DNA, 26 bp, Homo sapiens
ctggcacggggctggcatccggttgt

SEQ ID NO: 20085 - DNA, 26 bp, Homo sapiens
tggcacggggctggcatccggttgta

SEQ ID NO: 20086 - DNA, 26 bp, Homo sapiens
ggcacggggctggcatccggttgtac

SEQ ID NO: 20087 - DNA, 26 bp, Homo sapiens
gcacggggctggcatccggttgtacc

SEQ ID NO: 20088 - DNA, 26 bp, Homo sapiens
cacggggctggcatccggttgtacct

SEQ ID NO: 20089 - DNA, 26 bp, Homo sapiens
acggggctggcatccggttgtacctg

SEQ ID NO: 20090 - DNA, 26 bp, Homo sapiens
cggggctggcatccggttgtacctgg

SEQ ID NO: 20091 - DNA, 26 bp, Homo sapiens
ggggctggcatccggttgtacctggc

SEQ ID NO: 20092 - DNA, 26 bp, Homo sapiens
gggctggcatccggttgtacctggcc

SEQ ID NO: 20093 - DNA, 26 bp, Homo sapiens
ggctggcatccggttgtacctggcca

SEQ ID NO: 20094 - DNA, 26 bp, Homo sapiens
gctggcatccggttgtacctggccat

SEQ ID NO: 20095 - DNA, 26 bp, Homo sapiens
ctggcatccggttgtacctggccatc

SEQ ID NO: 20096 - DNA, 26 bp, Homo sapiens
tggcatccggttgtacctggccatcc

SEQ ID NO: 20097 - DNA, 26 bp, Homo sapiens
ggcatccggttgtacctggccatccc

SEQ ID NO: 20098 - DNA, 26 bp, Homo sapiens
gcatccggttgtacctggccatcccc

SEQ ID NO: 20099 - DNA, 26 bp, Homo sapiens
catccggttgtacctggccatcccca

SEQ ID NO: 20100 - DNA, 26 bp, Homo sapiens
atccggttgtacctggccatccccag

SEQ ID NO: 20101 - DNA, 26 bp, Homo sapiens
tccggttgtacctggccatccccagg

SEQ ID NO: 20102 - DNA, 26 bp, Homo sapiens
ccggttgtacctggccatccccagga

SEQ ID NO: 20103 - DNA, 26 bp, Homo sapiens
cggttgtacctggccatccccaggag

SEQ ID NO: 20104 - DNA, 26 bp, Homo sapiens
ggttgtacctggccatccccaggagc

SEQ ID NO: 20105 - DNA, 26 bp, Homo sapiens
gttgtacctggccatccccaggagcc

SEQ ID NO: 20106 - DNA, 26 bp, Homo sapiens
ttgtacctggccatccccaggagcca

SEQ ID NO: 20107 - DNA, 26 bp, Homo sapiens
tgtacctggccatccccaggagccag

SEQ ID NO: 20108 - DNA, 26 bp, Homo sapiens
gtacctggccatccccaggagccagc

SEQ ID NO: 20109 - DNA, 26 bp, Homo sapiens
tacctggccatccccaggagccagcc

SEQ ID NO: 20110 - DNA, 26 bp, Homo sapiens
acctggccatccccaggagccagcct

SEQ ID NO: 20111 - DNA, 26 bp, Homo sapiens
cctggccatccccaggagccagcctg

SEQ ID NO: 20112 - DNA, 26 bp, Homo sapiens
ctggccatccccaggagccagcctgg

SEQ ID NO: 20113 - DNA, 26 bp, Homo sapiens
tggccatccccaggagccagcctggt

SEQ ID NO: 20114 - DNA, 26 bp, Homo sapiens
ggccatccccaggagccagcctggtc

SEQ ID NO: 20115 - DNA, 26 bp, Homo sapiens
gccatccccaggagccagcctggtca

SEQ ID NO: 20116 - DNA, 26 bp, Homo sapiens
ccatccccaggagccagcctggtcac

SEQ ID NO: 20117 - DNA, 26 bp, Homo sapiens
catccccaggagccagcctggtcact

SEQ ID NO: 20118 - DNA, 26 bp, Homo sapiens
atccccaggagccagcctggtcactg

SEQ ID NO: 20119 - DNA, 26 bp, Homo sapiens
tccccaggagccagcctggtcactga

SEQ ID NO: 20120 - DNA, 26 bp, Homo sapiens
ccccaggagccagcctggtcactgag

SEQ ID NO: 20121 - DNA, 26 bp, Homo sapiens
cccaggagccagcctggtcactgagg

SEQ ID NO: 20122 - DNA, 26 bp, Homo sapiens
ccaggagccagcctggtcactgaggc

SEQ ID NO: 20123 - DNA, 26 bp, Homo sapiens
caggagccagcctggtcactgaggca

SEQ ID NO: 20124 - DNA, 26 bp, Homo sapiens
aggagccagcctggtcactgaggcac

SEQ ID NO: 20125 - DNA, 26 bp, Homo sapiens
ggagccagcctggtcactgaggcact

SEQ ID NO: 20126 - DNA, 26 bp, Homo sapiens
gagccagcctggtcactgaggcactc

SEQ ID NO: 20127 - DNA, 26 bp, Homo sapiens
agccagcctggtcactgaggcactcg

SEQ ID NO: 20128 - DNA, 26 bp, Homo sapiens
gccagcctggtcactgaggcactcgc

SEQ ID NO: 20129 - DNA, 26 bp, Homo sapiens
ccagcctggtcactgaggcactcgca

SEQ ID NO: 20130 - DNA, 26 bp, Homo sapiens
cagcctggtcactgaggcactcgcac

SEQ ID NO: 20131 - DNA, 26 bp, Homo sapiens
agcctggtcactgaggcactcgcacc

SEQ ID NO: 20132 - DNA, 26 bp, Homo sapiens
gcctggtcactgaggcactcgcacct

SEQ ID NO: 20133 - DNA, 26 bp, Homo sapiens
cctggtcactgaggcactcgcacctc

SEQ ID NO: 20134 - DNA, 26 bp, Homo sapiens
ctggtcactgaggcactcgcacctcc

SEQ ID NO: 20135 - DNA, 26 bp, Homo sapiens
tggtcactgaggcactcgcacctcca

SEQ ID NO: 20136 - DNA, 26 bp, Homo sapiens
ggtcactgaggcactcgcacctccag

SEQ ID NO: 20137 - DNA, 26 bp, Homo sapiens
gtcactgaggcactcgcacctccagg

SEQ ID NO: 20138 - DNA, 26 bp, Homo sapiens
tcactgaggcactcgcacctccaggc

SEQ ID NO: 20139 - DNA, 26 bp, Homo sapiens
cactgaggcactcgcacctccaggcg

SEQ ID NO: 20140 - DNA, 26 bp, Homo sapiens
actgaggcactcgcacctccaggcgg

SEQ ID NO: 20141 - DNA, 26 bp, Homo sapiens
ctgaggcactcgcacctccaggcggc

SEQ ID NO: 20142 - DNA, 26 bp, Homo sapiens
tgaggcactcgcacctccaggcggca

SEQ ID NO: 20143 - DNA, 26 bp, Homo sapiens
gaggcactcgcacctccaggcggcac

SEQ ID NO: 20144 - DNA, 26 bp, Homo sapiens
aggcactcgcacctccaggcggcact

SEQ ID NO: 20145 - DNA, 26 bp, Homo sapiens
ggcactcgcacctccaggcggcactc

SEQ ID NO: 20146 - DNA, 26 bp, Homo sapiens
gcactcgcacctccaggcggcactca

SEQ ID NO: 20147 - DNA, 26 bp, Homo sapiens
cactcgcacctccaggcggcactcac

SEQ ID NO: 20148 - DNA, 26 bp, Homo sapiens
actcgcacctccaggcggcactcaca

SEQ ID NO: 20149 - DNA, 26 bp, Homo sapiens
ctcgcacctccaggcggcactcacac

SEQ ID NO: 20150 - DNA, 26 bp, Homo sapiens
tcgcacctccaggcggcactcacacc

SEQ ID NO: 20151 - DNA, 26 bp, Homo sapiens
cgcacctccaggcggcactcacaccg

SEQ ID NO: 20152 - DNA, 26 bp, Homo sapiens
gcacctccaggcggcactcacaccgt

SEQ ID NO: 20153 - DNA, 26 bp, Homo sapiens
cacctccaggcggcactcacaccgtg

SEQ ID NO: 20154 - DNA, 26 bp, Homo sapiens
acctccaggcggcactcacaccgtgc

SEQ ID NO: 20155 - DNA, 26 bp, Homo sapiens
cctccaggcggcactcacaccgtgcc

SEQ ID NO: 20156 - DNA, 26 bp, Homo sapiens
ctccaggcggcactcacaccgtgcct

SEQ ID NO: 20157 - DNA, 26 bp, Homo sapiens
tccaggcggcactcacaccgtgcctc

SEQ ID NO: 20158 - DNA, 26 bp, Homo sapiens
ccaggcggcactcacaccgtgcctcg

SEQ ID NO: 20159 - DNA, 26 bp, Homo sapiens
caggcggcactcacaccgtgcctcgc

SEQ ID NO: 20160 - DNA, 26 bp, Homo sapiens
aggcggcactcacaccgtgcctcgcc

SEQ ID NO: 20161 - DNA, 26 bp, Homo sapiens
ggcggcactcacaccgtgcctcgccc

SEQ ID NO: 20162 - DNA, 26 bp, Homo sapiens
gcggcactcacaccgtgcctcgccct

SEQ ID NO: 20163 - DNA, 26 bp, Homo sapiens
cggcactcacaccgtgcctcgccctg

SEQ ID NO: 20164 - DNA, 26 bp, Homo sapiens
ggcactcacaccgtgcctcgccctgt

SEQ ID NO: 20165 - DNA, 26 bp, Homo sapiens
gcactcacaccgtgcctcgccctgta

SEQ ID NO: 20166 - DNA, 26 bp, Homo sapiens
cactcacaccgtgcctcgccctgtaa

SEQ ID NO: 20167 - DNA, 26 bp, Homo sapiens
actcacaccgtgcctcgccctgtaag

SEQ ID NO: 20168 - DNA, 26 bp, Homo sapiens
ctcacaccgtgcctcgccctgtaagt

SEQ ID NO: 20169 - DNA, 26 bp, Homo sapiens
tcacaccgtgcctcgccctgtaagtt

SEQ ID NO: 20170 - DNA, 26 bp, Homo sapiens
cacaccgtgcctcgccctgtaagttg

SEQ ID NO: 20171 - DNA, 26 bp, Homo sapiens
acaccgtgcctcgccctgtaagttgg

SEQ ID NO: 20172 - DNA, 26 bp, Homo sapiens
caccgtgcctcgccctgtaagttggt

SEQ ID NO: 20173 - DNA, 26 bp, Homo sapiens
accgtgcctcgccctgtaagttggtg

SEQ ID NO: 20174 - DNA, 26 bp, Homo sapiens
ccgtgcctcgccctgtaagttggtgg

SEQ ID NO: 20175 - DNA, 26 bp, Homo sapiens
cgtgcctcgccctgtaagttggtggc

SEQ ID NO: 20176 - DNA, 26 bp, Homo sapiens
gtgcctcgccctgtaagttggtggcc

SEQ ID NO: 20177 - DNA, 26 bp, Homo sapiens
tgcctcgccctgtaagttggtggccc

SEQ ID NO: 20178 - DNA, 26 bp, Homo sapiens
gcctcgccctgtaagttggtggccct

SEQ ID NO: 20179 - DNA, 26 bp, Homo sapiens
cctcgccctgtaagttggtggccctg

SEQ ID NO: 20180 - DNA, 26 bp, Homo sapiens
ctcgccctgtaagttggtggccctgc

SEQ ID NO: 20181 - DNA, 26 bp, Homo sapiens
tcgccctgtaagttggtggccctgca

SEQ ID NO: 20182 - DNA, 26 bp, Homo sapiens
cgccctgtaagttggtggccctgcag

SEQ ID NO: 20183 - DNA, 26 bp, Homo sapiens
gccctgtaagttggtggccctgcaga

SEQ ID NO: 20184 - DNA, 26 bp, Homo sapiens
ccctgtaagttggtggccctgcagac

SEQ ID NO: 20185 - DNA, 26 bp, Homo sapiens
cctgtaagttggtggccctgcagaca

SEQ ID NO: 20186 - DNA, 26 bp, Homo sapiens
ctgtaagttggtggccctgcagacat

SEQ ID NO: 20187 - DNA, 26 bp, Homo sapiens
tgtaagttggtggccctgcagacata

SEQ ID NO: 20188 - DNA, 26 bp, Homo sapiens
gtaagttggtggccctgcagacatag

SEQ ID NO: 20189 - DNA, 26 bp, Homo sapiens
taagttggtggccctgcagacataga

SEQ ID NO: 20190 - DNA, 26 bp, Homo sapiens
aagttggtggccctgcagacatagat

SEQ ID NO: 20191 - DNA, 26 bp, Homo sapiens
agttggtggccctgcagacatagatg

SEQ ID NO: 20192 - DNA, 26 bp, Homo sapiens
gttggtggccctgcagacatagatgc

SEQ ID NO: 20193 - DNA, 26 bp, Homo sapiens
ttggtggccctgcagacatagatgcc

SEQ ID NO: 20194 - DNA, 26 bp, Homo sapiens
tggtggccctgcagacatagatgccc

SEQ ID NO: 20195 - DNA, 26 bp, Homo sapiens
ggtggccctgcagacatagatgcccc

SEQ ID NO: 20196 - DNA, 26 bp, Homo sapiens
gtggccctgcagacatagatgccccc

SEQ ID NO: 20197 - DNA, 26 bp, Homo sapiens
tggccctgcagacatagatgcccccg

SEQ ID NO: 20198 - DNA, 26 bp, Homo sapiens
ggccctgcagacatagatgcccccgt

SEQ ID NO: 20199 - DNA, 26 bp, Homo sapiens
gccctgcagacatagatgcccccgtc

SEQ ID NO: 20200 - DNA, 26 bp, Homo sapiens
ccctgcagacatagatgcccccgtca

SEQ ID NO: 20201 - DNA, 26 bp, Homo sapiens
cctgcagacatagatgcccccgtcaa

SEQ ID NO: 20202 - DNA, 26 bp, Homo sapiens
ctgcagacatagatgcccccgtcaaa

SEQ ID NO: 20203 - DNA, 26 bp, Homo sapiens
tgcagacatagatgcccccgtcaaag

SEQ ID NO: 20204 - DNA, 26 bp, Homo sapiens
gcagacatagatgcccccgtcaaagg

SEQ ID NO: 20205 - DNA, 26 bp, Homo sapiens
cagacatagatgcccccgtcaaaggg

SEQ ID NO: 20206 - DNA, 26 bp, Homo sapiens
agacatagatgcccccgtcaaagggg

SEQ ID NO: 20207 - DNA, 26 bp, Homo sapiens
gacatagatgcccccgtcaaaggggc

SEQ ID NO: 20208 - DNA, 26 bp, Homo sapiens
acatagatgcccccgtcaaaggggca

SEQ ID NO: 20209 - DNA, 26 bp, Homo sapiens
catagatgcccccgtcaaaggggcag

SEQ ID NO: 20210 - DNA, 26 bp, Homo sapiens
atagatgcccccgtcaaaggggcagg

SEQ ID NO: 20211 - DNA, 26 bp, Homo sapiens
tagatgcccccgtcaaaggggcaggg

SEQ ID NO: 20212 - DNA, 26 bp, Homo sapiens
agatgcccccgtcaaaggggcagggc

SEQ ID NO: 20213 - DNA, 26 bp, Homo sapiens
gatgcccccgtcaaaggggcagggct

SEQ ID NO: 20214 - DNA, 26 bp, Homo sapiens
atgcccccgtcaaaggggcagggctt

SEQ ID NO: 20215 - DNA, 26 bp, Homo sapiens
tgcccccgtcaaaggggcagggcttt

SEQ ID NO: 20216 - DNA, 26 bp, Homo sapiens
gcccccgtcaaaggggcagggctttc

SEQ ID NO: 20217 - DNA, 26 bp, Homo sapiens
cccccgtcaaaggggcagggctttct

SEQ ID NO: 20218 - DNA, 26 bp, Homo sapiens
ccccgtcaaaggggcagggctttcta

SEQ ID NO: 20219 - DNA, 26 bp, Homo sapiens
cccgtcaaaggggcagggctttctaa

SEQ ID NO: 20220 - DNA, 26 bp, Homo sapiens
ccgtcaaaggggcagggctttctaat

SEQ ID NO: 20221 - DNA, 26 bp, Homo sapiens
cgtcaaaggggcagggctttctaatc

SEQ ID NO: 20222 - DNA, 26 bp, Homo sapiens
gtcaaaggggcagggctttctaatct

SEQ ID NO: 20223 - DNA, 26 bp, Homo sapiens
tcaaaggggcagggctttctaatctc

SEQ ID NO: 20224 - DNA, 26 bp, Homo sapiens
caaaggggcagggctttctaatctcc

SEQ ID NO: 20225 - DNA, 26 bp, Homo sapiens
aaaggggcagggctttctaatctcca

SEQ ID NO: 20226 - DNA, 26 bp, Homo sapiens
aaggggcagggctttctaatctccag

SEQ ID NO: 20227 - DNA, 26 bp, Homo sapiens
aggggcagggctttctaatctccaga

SEQ ID NO: 20228 - DNA, 26 bp, Homo sapiens
ggggcagggctttctaatctccagag

SEQ ID NO: 20229 - DNA, 26 bp, Homo sapiens
gggcagggctttctaatctccagagt

SEQ ID NO: 20230 - DNA, 26 bp, Homo sapiens
ggcagggctttctaatctccagagtc

SEQ ID NO: 20231 - DNA, 26 bp, Homo sapiens
gcagggctttctaatctccagagtca

SEQ ID NO: 20232 - DNA, 26 bp, Homo sapiens
cagggctttctaatctccagagtcaa

SEQ ID NO: 20233 - DNA, 26 bp, Homo sapiens
agggctttctaatctccagagtcaac

SEQ ID NO: 20234 - DNA, 26 bp, Homo sapiens
gggctttctaatctccagagtcaaca

SEQ ID NO: 20235 - DNA, 26 bp, Homo sapiens
ggctttctaatctccagagtcaacac

SEQ ID NO: 20236 - DNA, 26 bp, Homo sapiens
gctttctaatctccagagtcaacact

SEQ ID NO: 20237 - DNA, 26 bp, Homo sapiens
ctttctaatctccagagtcaacactc

SEQ ID NO: 20238 - DNA, 26 bp, Homo sapiens
tttctaatctccagagtcaacactcc

SEQ ID NO: 20239 - DNA, 26 bp, Homo sapiens
ttctaatctccagagtcaacactccc

SEQ ID NO: 20240 - DNA, 26 bp, Homo sapiens
tctaatctccagagtcaacactccct

SEQ ID NO: 20241 - DNA, 26 bp, Homo sapiens
ctaatctccagagtcaacactccctg

SEQ ID NO: 20242 - DNA, 26 bp, Homo sapiens
taatctccagagtcaacactccctgc

SEQ ID NO: 20243 - DNA, 26 bp, Homo sapiens
aatctccagagtcaacactccctgct

SEQ ID NO: 20244 - DNA, 26 bp, Homo sapiens
atctccagagtcaacactccctgctt

SEQ ID NO: 20245 - DNA, 26 bp, Homo sapiens
tctccagagtcaacactccctgcttg

SEQ ID NO: 20246 - DNA, 26 bp, Homo sapiens
ctccagagtcaacactccctgcttgc

SEQ ID NO: 20247 - DNA, 26 bp, Homo sapiens
tccagagtcaacactccctgcttgct

SEQ ID NO: 20248 - DNA, 26 bp, Homo sapiens
ccagagtcaacactccctgcttgctg

SEQ ID NO: 20249 - DNA, 26 bp, Homo sapiens
cagagtcaacactccctgcttgctga

SEQ ID NO: 20250 - DNA, 26 bp, Homo sapiens
agagtcaacactccctgcttgctgaa

SEQ ID NO: 20251 - DNA, 26 bp, Homo sapiens
gagtcaacactccctgcttgctgaac

SEQ ID NO: 20252 - DNA, 26 bp, Homo sapiens
agtcaacactccctgcttgctgaaca

SEQ ID NO: 20253 - DNA, 26 bp, Homo sapiens
gtcaacactccctgcttgctgaacat

SEQ ID NO: 20254 - DNA, 26 bp, Homo sapiens
tcaacactccctgcttgctgaacatg

SEQ ID NO: 20255 - DNA, 26 bp, Homo sapiens
caacactccctgcttgctgaacatgc

SEQ ID NO: 20256 - DNA, 26 bp, Homo sapiens
aacactccctgcttgctgaacatgcg

SEQ ID NO: 20257 - DNA, 26 bp, Homo sapiens
acactccctgcttgctgaacatgcgg

SEQ ID NO: 20258 - DNA, 26 bp, Homo sapiens
cactccctgcttgctgaacatgcgga

SEQ ID NO: 20259 - DNA, 26 bp, Homo sapiens
actccctgcttgctgaacatgcggaa

SEQ ID NO: 20260 - DNA, 26 bp, Homo sapiens
ctccctgcttgctgaacatgcggaag

SEQ ID NO: 20261 - DNA, 26 bp, Homo sapiens
tccctgcttgctgaacatgcggaagc

SEQ ID NO: 20262 - DNA, 26 bp, Homo sapiens
ccctgcttgctgaacatgcggaagcg

SEQ ID NO: 20263 - DNA, 26 bp, Homo sapiens
cctgcttgctgaacatgcggaagcgg

SEQ ID NO: 20264 - DNA, 26 bp, Homo sapiens
ctgcttgctgaacatgcggaagcggg

SEQ ID NO: 20265 - DNA, 26 bp, Homo sapiens
tgcttgctgaacatgcggaagcgggc

SEQ ID NO: 20266 - DNA, 26 bp, Homo sapiens
gcttgctgaacatgcggaagcgggcg

SEQ ID NO: 20267 - DNA, 26 bp, Homo sapiens
cttgctgaacatgcggaagcgggcgt

SEQ ID NO: 20268 - DNA, 26 bp, Homo sapiens
ttgctgaacatgcggaagcgggcgtc

SEQ ID NO: 20269 - DNA, 26 bp, Homo sapiens
tgctgaacatgcggaagcgggcgtct

SEQ ID NO: 20270 - DNA, 26 bp, Homo sapiens
gctgaacatgcggaagcgggcgtctt

SEQ ID NO: 20271 - DNA, 26 bp, Homo sapiens
ctgaacatgcggaagcgggcgtcttc

SEQ ID NO: 20272 - DNA, 26 bp, Homo sapiens
tgaacatgcggaagcgggcgtcttct

SEQ ID NO: 20273 - DNA, 26 bp, Homo sapiens
gaacatgcggaagcgggcgtcttctc

SEQ ID NO: 20274 - DNA, 26 bp, Homo sapiens
aacatgcggaagcgggcgtcttctcc

SEQ ID NO: 20275 - DNA, 26 bp, Homo sapiens
acatgcggaagcgggcgtcttctccc

SEQ ID NO: 20276 - DNA, 26 bp, Homo sapiens
catgcggaagcgggcgtcttctccca

SEQ ID NO: 20277 - DNA, 26 bp, Homo sapiens
atgcggaagcgggcgtcttctcccag

SEQ ID NO: 20278 - DNA, 26 bp, Homo sapiens
tgcggaagcgggcgtcttctcccagg

SEQ ID NO: 20279 - DNA, 26 bp, Homo sapiens
gcggaagcgggcgtcttctcccaggt

SEQ ID NO: 20280 - DNA, 26 bp, Homo sapiens
cggaagcgggcgtcttctcccaggtc

SEQ ID NO: 20281 - DNA, 26 bp, Homo sapiens
ggaagcgggcgtcttctcccaggtcc

SEQ ID NO: 20282 - DNA, 26 bp, Homo sapiens
gaagcgggcgtcttctcccaggtcca

SEQ ID NO: 20283 - DNA, 26 bp, Homo sapiens
aagcgggcgtcttctcccaggtccag

SEQ ID NO: 20284 - DNA, 26 bp, Homo sapiens
agcgggcgtcttctcccaggtccagg

SEQ ID NO: 20285 - DNA, 26 bp, Homo sapiens
gcgggcgtcttctcccaggtccaggc

SEQ ID NO: 20286 - DNA, 26 bp, Homo sapiens
cgggcgtcttctcccaggtccaggcc

SEQ ID NO: 20287 - DNA, 26 bp, Homo sapiens
gggcgtcttctcccaggtccaggcca

SEQ ID NO: 20288 - DNA, 26 bp, Homo sapiens
ggcgtcttctcccaggtccaggccat

SEQ ID NO: 20289 - DNA, 26 bp, Homo sapiens
gcgtcttctcccaggtccaggccatt

SEQ ID NO: 20290 - DNA, 26 bp, Homo sapiens
cgtcttctcccaggtccaggccattc

SEQ ID NO: 20291 - DNA, 26 bp, Homo sapiens
gtcttctcccaggtccaggccattct

SEQ ID NO: 20292 - DNA, 26 bp, Homo sapiens
tcttctcccaggtccaggccattctt

SEQ ID NO: 20293 - DNA, 26 bp, Homo sapiens
cttctcccaggtccaggccattcttg

SEQ ID NO: 20294 - DNA, 26 bp, Homo sapiens
ttctcccaggtccaggccattcttga

SEQ ID NO: 20295 - DNA, 26 bp, Homo sapiens
tctcccaggtccaggccattcttgaa

SEQ ID NO: 20296 - DNA, 26 bp, Homo sapiens
ctcccaggtccaggccattcttgaac

SEQ ID NO: 20297 - DNA, 26 bp, Homo sapiens
tcccaggtccaggccattcttgaacc

SEQ ID NO: 20298 - DNA, 26 bp, Homo sapiens
cccaggtccaggccattcttgaacca

SEQ ID NO: 20299 - DNA, 26 bp, Homo sapiens
ccaggtccaggccattcttgaaccag

SEQ ID NO: 20300 - DNA, 26 bp, Homo sapiens
caggtccaggccattcttgaaccagg

SEQ ID NO: 20301 - DNA, 26 bp, Homo sapiens
aggtccaggccattcttgaaccagga

SEQ ID NO: 20302 - DNA, 26 bp, Homo sapiens
ggtccaggccattcttgaaccaggaa

SEQ ID NO: 20303 - DNA, 26 bp, Homo sapiens
gtccaggccattcttgaaccaggaaa

SEQ ID NO: 20304 - DNA, 26 bp, Homo sapiens
tccaggccattcttgaaccaggaaat

SEQ ID NO: 20305 - DNA, 26 bp, Homo sapiens
ccaggccattcttgaaccaggaaatc

SEQ ID NO: 20306 - DNA, 26 bp, Homo sapiens
caggccattcttgaaccaggaaatct

SEQ ID NO: 20307 - DNA, 26 bp, Homo sapiens
aggccattcttgaaccaggaaatctt

SEQ ID NO: 20308 - DNA, 26 bp, Homo sapiens
ggccattcttgaaccaggaaatcttg

SEQ ID NO: 20309 - DNA, 26 bp, Homo sapiens
gccattcttgaaccaggaaatcttgg

SEQ ID NO: 20310 - DNA, 26 bp, Homo sapiens
ccattcttgaaccaggaaatcttggg

SEQ ID NO: 20311 - DNA, 26 bp, Homo sapiens
cattcttgaaccaggaaatcttgggc

SEQ ID NO: 20312 - DNA, 26 bp, Homo sapiens
attcttgaaccaggaaatcttgggct

SEQ ID NO: 20313 - DNA, 26 bp, Homo sapiens
ttcttgaaccaggaaatcttgggctt

SEQ ID NO: 20314 - DNA, 26 bp, Homo sapiens
tcttgaaccaggaaatcttgggcttg

SEQ ID NO: 20315 - DNA, 26 bp, Homo sapiens
cttgaaccaggaaatcttgggcttgg

SEQ ID NO: 20316 - DNA, 26 bp, Homo sapiens
ttgaaccaggaaatcttgggcttggg

SEQ ID NO: 20317 - DNA, 26 bp, Homo sapiens
tgaaccaggaaatcttgggcttgggg

SEQ ID NO: 20318 - DNA, 26 bp, Homo sapiens
gaaccaggaaatcttgggcttggggc

SEQ ID NO: 20319 - DNA, 26 bp, Homo sapiens
aaccaggaaatcttgggcttggggct

SEQ ID NO: 20320 - DNA, 26 bp, Homo sapiens
accaggaaatcttgggcttggggcta

SEQ ID NO: 20321 - DNA, 26 bp, Homo sapiens
ccaggaaatcttgggcttggggctac

SEQ ID NO: 20322 - DNA, 26 bp, Homo sapiens
caggaaatcttgggcttggggctacc

SEQ ID NO: 20323 - DNA, 26 bp, Homo sapiens
aggaaatcttgggcttggggctaccc

SEQ ID NO: 20324 - DNA, 26 bp, Homo sapiens
ggaaatcttgggcttggggctacccc

SEQ ID NO: 20325 - DNA, 26 bp, Homo sapiens
gaaatcttgggcttggggctaccccg

SEQ ID NO: 20326 - DNA, 26 bp, Homo sapiens
aaatcttgggcttggggctaccccgg

SEQ ID NO: 20327 - DNA, 26 bp, Homo sapiens
aatcttgggcttggggctaccccgga

SEQ ID NO: 20328 - DNA, 26 bp, Homo sapiens
atcttgggcttggggctaccccggac

SEQ ID NO: 20329 - DNA, 26 bp, Homo sapiens
tcttgggcttggggctaccccggaca

SEQ ID NO: 20330 - DNA, 26 bp, Homo sapiens
cttgggcttggggctaccccggacag

SEQ ID NO: 20331 - DNA, 26 bp, Homo sapiens
ttgggcttggggctaccccggacagc

SEQ ID NO: 20332 - DNA, 26 bp, Homo sapiens
tgggcttggggctaccccggacagca

SEQ ID NO: 20333 - DNA, 26 bp, Homo sapiens
gggcttggggctaccccggacagcac

SEQ ID NO: 20334 - DNA, 26 bp, Homo sapiens
ggcttggggctaccccggacagcaca

SEQ ID NO: 20335 - DNA, 26 bp, Homo sapiens
gcttggggctaccccggacagcacag

SEQ ID NO: 20336 - DNA, 26 bp, Homo sapiens
cttggggctaccccggacagcacagc

SEQ ID NO: 20337 - DNA, 26 bp, Homo sapiens
ttggggctaccccggacagcacagca

SEQ ID NO: 20338 - DNA, 26 bp, Homo sapiens
tggggctaccccggacagcacagcag

SEQ ID NO: 20339 - DNA, 26 bp, Homo sapiens
ggggctaccccggacagcacagcaga

SEQ ID NO: 20340 - DNA, 26 bp, Homo sapiens
gggctaccccggacagcacagcagag

SEQ ID NO: 20341 - DNA, 26 bp, Homo sapiens
ggctaccccggacagcacagcagagc

SEQ ID NO: 20342 - DNA, 26 bp, Homo sapiens
gctaccccggacagcacagcagagca

SEQ ID NO: 20343 - DNA, 26 bp, Homo sapiens
ctaccccggacagcacagcagagcat

SEQ ID NO: 20344 - DNA, 26 bp, Homo sapiens
taccccggacagcacagcagagcata

SEQ ID NO: 20345 - DNA, 26 bp, Homo sapiens
accccggacagcacagcagagcatag

SEQ ID NO: 20346 - DNA, 26 bp, Homo sapiens
ccccggacagcacagcagagcatagc

SEQ ID NO: 20347 - DNA, 26 bp, Homo sapiens
cccggacagcacagcagagcatagca

SEQ ID NO: 20348 - DNA, 26 bp, Homo sapiens
ccggacagcacagcagagcatagcag

SEQ ID NO: 20349 - DNA, 26 bp, Homo sapiens
cggacagcacagcagagcatagcagt

SEQ ID NO: 20350 - DNA, 26 bp, Homo sapiens
ggacagcacagcagagcatagcagtg

SEQ ID NO: 20351 - DNA, 26 bp, Homo sapiens
gacagcacagcagagcatagcagtgt

SEQ ID NO: 20352 - DNA, 26 bp, Homo sapiens
acagcacagcagagcatagcagtgta

SEQ ID NO: 20353 - DNA, 26 bp, Homo sapiens
cagcacagcagagcatagcagtgtag

SEQ ID NO: 20354 - DNA, 26 bp, Homo sapiens
agcacagcagagcatagcagtgtagc

SEQ ID NO: 20355 - DNA, 26 bp, Homo sapiens
gcacagcagagcatagcagtgtagcc

SEQ ID NO: 20356 - DNA, 26 bp, Homo sapiens
cacagcagagcatagcagtgtagccc

SEQ ID NO: 20357 - DNA, 26 bp, Homo sapiens
acagcagagcatagcagtgtagcccg

SEQ ID NO: 20358 - DNA, 26 bp, Homo sapiens
cagcagagcatagcagtgtagcccgc

SEQ ID NO: 20359 - DNA, 26 bp, Homo sapiens
agcagagcatagcagtgtagcccgcg

SEQ ID NO: 20360 - DNA, 26 bp, Homo sapiens
gcagagcatagcagtgtagcccgcga

SEQ ID NO: 20361 - DNA, 26 bp, Homo sapiens
cagagcatagcagtgtagcccgcgat

SEQ ID NO: 20362 - DNA, 26 bp, Homo sapiens
agagcatagcagtgtagcccgcgatg

SEQ ID NO: 20363 - DNA, 26 bp, Homo sapiens
gagcatagcagtgtagcccgcgatga

SEQ ID NO: 20364 - DNA, 26 bp, Homo sapiens
agcatagcagtgtagcccgcgatgac

SEQ ID NO: 20365 - DNA, 26 bp, Homo sapiens
gcatagcagtgtagcccgcgatgacc

SEQ ID NO: 20366 - DNA, 26 bp, Homo sapiens
catagcagtgtagcccgcgatgaccg

SEQ ID NO: 20367 - DNA, 26 bp, Homo sapiens
atagcagtgtagcccgcgatgaccga

SEQ ID NO: 20368 - DNA, 26 bp, Homo sapiens
tagcagtgtagcccgcgatgaccgag

SEQ ID NO: 20369 - DNA, 26 bp, Homo sapiens
agcagtgtagcccgcgatgaccgagc

SEQ ID NO: 20370 - DNA, 26 bp, Homo sapiens
gcagtgtagcccgcgatgaccgagcg

SEQ ID NO: 20371 - DNA, 26 bp, Homo sapiens
cagtgtagcccgcgatgaccgagcgg

SEQ ID NO: 20372 - DNA, 26 bp, Homo sapiens
agtgtagcccgcgatgaccgagcggt

SEQ ID NO: 20373 - DNA, 26 bp, Homo sapiens
gtgtagcccgcgatgaccgagcggtt

SEQ ID NO: 20374 - DNA, 26 bp, Homo sapiens
tgtagcccgcgatgaccgagcggttc

SEQ ID NO: 20375 - DNA, 26 bp, Homo sapiens
gtagcccgcgatgaccgagcggttca

SEQ ID NO: 20376 - DNA, 26 bp, Homo sapiens
tagcccgcgatgaccgagcggttcac

SEQ ID NO: 20377 - DNA, 26 bp, Homo sapiens
agcccgcgatgaccgagcggttcacc

SEQ ID NO: 20378 - DNA, 26 bp, Homo sapiens
gcccgcgatgaccgagcggttcacca

SEQ ID NO: 20379 - DNA, 26 bp, Homo sapiens
cccgcgatgaccgagcggttcaccag

SEQ ID NO: 20380 - DNA, 26 bp, Homo sapiens
ccgcgatgaccgagcggttcaccagg

SEQ ID NO: 20381 - DNA, 26 bp, Homo sapiens
cgcgatgaccgagcggttcaccaggg

SEQ ID NO: 20382 - DNA, 26 bp, Homo sapiens
gcgatgaccgagcggttcaccagggg

SEQ ID NO: 20383 - DNA, 26 bp, Homo sapiens
cgatgaccgagcggttcaccaggggc

SEQ ID NO: 20384 - DNA, 26 bp, Homo sapiens
gatgaccgagcggttcaccaggggct

SEQ ID NO: 20385 - DNA, 26 bp, Homo sapiens
atgaccgagcggttcaccaggggctg

SEQ ID NO: 20386 - DNA, 26 bp, Homo sapiens
tgaccgagcggttcaccaggggctgg

SEQ ID NO: 20387 - DNA, 26 bp, Homo sapiens
gaccgagcggttcaccaggggctggg

SEQ ID NO: 20388 - DNA, 26 bp, Homo sapiens
accgagcggttcaccaggggctgggt

SEQ ID NO: 20389 - DNA, 26 bp, Homo sapiens
ccgagcggttcaccaggggctgggtg

SEQ ID NO: 20390 - DNA, 26 bp, Homo sapiens
cgagcggttcaccaggggctgggtga

SEQ ID NO: 20391 - DNA, 26 bp, Homo sapiens
gagcggttcaccaggggctgggtgaa

SEQ ID NO: 20392 - DNA, 26 bp, Homo sapiens
agcggttcaccaggggctgggtgaag

SEQ ID NO: 20393 - DNA, 26 bp, Homo sapiens
gcggttcaccaggggctgggtgaagc

SEQ ID NO: 20394 - DNA, 26 bp, Homo sapiens
cggttcaccaggggctgggtgaagct

SEQ ID NO: 20395 - DNA, 26 bp, Homo sapiens
ggttcaccaggggctgggtgaagctt

SEQ ID NO: 20396 - DNA, 26 bp, Homo sapiens
gttcaccaggggctgggtgaagcttg

SEQ ID NO: 20397 - DNA, 26 bp, Homo sapiens
ttcaccaggggctgggtgaagcttgg

SEQ ID NO: 20398 - DNA, 26 bp, Homo sapiens
tcaccaggggctgggtgaagcttggg

SEQ ID NO: 20399 - DNA, 26 bp, Homo sapiens
caccaggggctgggtgaagcttgggg

SEQ ID NO: 20400 - DNA, 26 bp, Homo sapiens
accaggggctgggtgaagcttggggc

SEQ ID NO: 20401 - DNA, 26 bp, Homo sapiens
ccaggggctgggtgaagcttggggcc

SEQ ID NO: 20402 - DNA, 26 bp, Homo sapiens
caggggctgggtgaagcttggggcct

SEQ ID NO: 20403 - DNA, 26 bp, Homo sapiens
aggggctgggtgaagcttggggcctc

SEQ ID NO: 20404 - DNA, 26 bp, Homo sapiens
ggggctgggtgaagcttggggcctcg

SEQ ID NO: 20405 - DNA, 26 bp, Homo sapiens
gggctgggtgaagcttggggcctcgg

SEQ ID NO: 20406 - DNA, 26 bp, Homo sapiens
ggctgggtgaagcttggggcctcgga

SEQ ID NO: 20407 - DNA, 26 bp, Homo sapiens
gctgggtgaagcttggggcctcggag

SEQ ID NO: 20408 - DNA, 26 bp, Homo sapiens
ctgggtgaagcttggggcctcggaga

SEQ ID NO: 20409 - DNA, 26 bp, Homo sapiens
tgggtgaagcttggggcctcggagaa

SEQ ID NO: 20410 - DNA, 26 bp, Homo sapiens
gggtgaagcttggggcctcggagaag

SEQ ID NO: 20411 - DNA, 26 bp, Homo sapiens
ggtgaagcttggggcctcggagaagt

SEQ ID NO: 20412 - DNA, 26 bp, Homo sapiens
gtgaagcttggggcctcggagaagtc

SEQ ID NO: 20413 - DNA, 26 bp, Homo sapiens
tgaagcttggggcctcggagaagtcc

SEQ ID NO: 20414 - DNA, 26 bp, Homo sapiens
gaagcttggggcctcggagaagtcca

SEQ ID NO: 20415 - DNA, 26 bp, Homo sapiens
aagcttggggcctcggagaagtccag

SEQ ID NO: 20416 - DNA, 26 bp, Homo sapiens
agcttggggcctcggagaagtccagg

SEQ ID NO: 20417 - DNA, 26 bp, Homo sapiens
gcttggggcctcggagaagtccaggg

SEQ ID NO: 20418 - DNA, 26 bp, Homo sapiens
cttggggcctcggagaagtccagggc

SEQ ID NO: 20419 - DNA, 26 bp, Homo sapiens
ttggggcctcggagaagtccagggcc

SEQ ID NO: 20420 - DNA, 26 bp, Homo sapiens
tggggcctcggagaagtccagggcct

SEQ ID NO: 20421 - DNA, 26 bp, Homo sapiens
ggggcctcggagaagtccagggcctt

SEQ ID NO: 20422 - DNA, 26 bp, Homo sapiens
gggcctcggagaagtccagggcctta

SEQ ID NO: 20423 - DNA, 26 bp, Homo sapiens
ggcctcggagaagtccagggccttat

SEQ ID NO: 20424 - DNA, 26 bp, Homo sapiens
gcctcggagaagtccagggccttata

SEQ ID NO: 20425 - DNA, 26 bp, Homo sapiens
cctcggagaagtccagggccttatag

SEQ ID NO: 20426 - DNA, 26 bp, Homo sapiens
ctcggagaagtccagggccttatagt

SEQ ID NO: 20427 - DNA, 26 bp, Homo sapiens
tcggagaagtccagggccttatagtt

SEQ ID NO: 20428 - DNA, 26 bp, Homo sapiens
cggagaagtccagggccttatagttg

SEQ ID NO: 20429 - DNA, 26 bp, Homo sapiens
ggagaagtccagggccttatagttgg

SEQ ID NO: 20430 - DNA, 26 bp, Homo sapiens
gagaagtccagggccttatagttggg

SEQ ID NO: 20431 - DNA, 26 bp, Homo sapiens
agaagtccagggccttatagttgggt

SEQ ID NO: 20432 - DNA, 26 bp, Homo sapiens
gaagtccagggccttatagttgggtg

SEQ ID NO: 20433 - DNA, 26 bp, Homo sapiens
aagtccagggccttatagttgggtgg

SEQ ID NO: 20434 - DNA, 26 bp, Homo sapiens
agtccagggccttatagttgggtggc

SEQ ID NO: 20435 - DNA, 26 bp, Homo sapiens
gtccagggccttatagttgggtggct

SEQ ID NO: 20436 - DNA, 26 bp, Homo sapiens
tccagggccttatagttgggtggctc

SEQ ID NO: 20437 - DNA, 26 bp, Homo sapiens
ccagggccttatagttgggtggctca

SEQ ID NO: 20438 - DNA, 26 bp, Homo sapiens
cagggccttatagttgggtggctcat

SEQ ID NO: 20439 - DNA, 26 bp, Homo sapiens
agggccttatagttgggtggctcata

SEQ ID NO: 20440 - DNA, 26 bp, Homo sapiens
gggccttatagttgggtggctcatag

SEQ ID NO: 20441 - DNA, 26 bp, Homo sapiens
ggccttatagttgggtggctcatagg

SEQ ID NO: 20442 - DNA, 26 bp, Homo sapiens
gccttatagttgggtggctcataggt

SEQ ID NO: 20443 - DNA, 26 bp, Homo sapiens
ccttatagttgggtggctcataggtg

SEQ ID NO: 20444 - DNA, 26 bp, Homo sapiens
cttatagttgggtggctcataggtga

SEQ ID NO: 20445 - DNA, 26 bp, Homo sapiens
ttatagttgggtggctcataggtgat

SEQ ID NO: 20446 - DNA, 26 bp, Homo sapiens
tatagttgggtggctcataggtgatg

SEQ ID NO: 20447 - DNA, 26 bp, Homo sapiens
atagttgggtggctcataggtgatgc

SEQ ID NO: 20448 - DNA, 26 bp, Homo sapiens
tagttgggtggctcataggtgatgcc

SEQ ID NO: 20449 - DNA, 26 bp, Homo sapiens
agttgggtggctcataggtgatgcct

SEQ ID NO: 20450 - DNA, 26 bp, Homo sapiens
gttgggtggctcataggtgatgcctg

SEQ ID NO: 20451 - DNA, 26 bp, Homo sapiens
ttgggtggctcataggtgatgcctgg

SEQ ID NO: 20452 - DNA, 26 bp, Homo sapiens
tgggtggctcataggtgatgcctggt

SEQ ID NO: 20453 - DNA, 26 bp, Homo sapiens
gggtggctcataggtgatgcctggtc

SEQ ID NO: 20454 - DNA, 26 bp, Homo sapiens
ggtggctcataggtgatgcctggtct

SEQ ID NO: 20455 - DNA, 26 bp, Homo sapiens
gtggctcataggtgatgcctggtctg

SEQ ID NO: 20456 - DNA, 26 bp, Homo sapiens
tggctcataggtgatgcctggtctgg

SEQ ID NO: 20457 - DNA, 26 bp, Homo sapiens
ggctcataggtgatgcctggtctggg

SEQ ID NO: 20458 - DNA, 26 bp, Homo sapiens
gctcataggtgatgcctggtctgggg

SEQ ID NO: 20459 - DNA, 26 bp, Homo sapiens
ctcataggtgatgcctggtctgggga

SEQ ID NO: 20460 - DNA, 26 bp, Homo sapiens
tcataggtgatgcctggtctggggat

SEQ ID NO: 20461 - DNA, 26 bp, Homo sapiens
cataggtgatgcctggtctggggata

SEQ ID NO: 20462 - DNA, 26 bp, Homo sapiens
ataggtgatgcctggtctggggataa

SEQ ID NO: 20463 - DNA, 26 bp, Homo sapiens
taggtgatgcctggtctggggataaa

SEQ ID NO: 20464 - DNA, 26 bp, Homo sapiens
aggtgatgcctggtctggggataaag

SEQ ID NO: 20465 - DNA, 26 bp, Homo sapiens
ggtgatgcctggtctggggataaaga

SEQ ID NO: 20466 - DNA, 26 bp, Homo sapiens
gtgatgcctggtctggggataaagac

SEQ ID NO: 20467 - DNA, 26 bp, Homo sapiens
tgatgcctggtctggggataaagacg

SEQ ID NO: 20468 - DNA, 26 bp, Homo sapiens
gatgcctggtctggggataaagacgg

SEQ ID NO: 20469 - DNA, 26 bp, Homo sapiens
atgcctggtctggggataaagacggg

SEQ ID NO: 20470 - DNA, 26 bp, Homo sapiens
tgcctggtctggggataaagacgggc

SEQ ID NO: 20471 - DNA, 26 bp, Homo sapiens
gcctggtctggggataaagacgggct

SEQ ID NO: 20472 - DNA, 26 bp, Homo sapiens
cctggtctggggataaagacgggctc

SEQ ID NO: 20473 - DNA, 26 bp, Homo sapiens
ctggtctggggataaagacgggctcc

SEQ ID NO: 20474 - DNA, 26 bp, Homo sapiens
tggtctggggataaagacgggctcct

SEQ ID NO: 20475 - DNA, 26 bp, Homo sapiens
ggtctggggataaagacgggctcctt

SEQ ID NO: 20476 - DNA, 26 bp, Homo sapiens
gtctggggataaagacgggctccttg

SEQ ID NO: 20477 - DNA, 26 bp, Homo sapiens
tctggggataaagacgggctccttgg

SEQ ID NO: 20478 - DNA, 26 bp, Homo sapiens
ctggggataaagacgggctccttggt

SEQ ID NO: 20479 - DNA, 26 bp, Homo sapiens
tggggataaagacgggctccttggtg

SEQ ID NO: 20480 - DNA, 26 bp, Homo sapiens
ggggataaagacgggctccttggtgg

SEQ ID NO: 20481 - DNA, 26 bp, Homo sapiens
gggataaagacgggctccttggtggt

SEQ ID NO: 20482 - DNA, 26 bp, Homo sapiens
ggataaagacgggctccttggtggtg

SEQ ID NO: 20483 - DNA, 26 bp, Homo sapiens
gataaagacgggctccttggtggtgg

SEQ ID NO: 20484 - DNA, 26 bp, Homo sapiens
ataaagacgggctccttggtggtggc

SEQ ID NO: 20485 - DNA, 26 bp, Homo sapiens
taaagacgggctccttggtggtggcc

SEQ ID NO: 20486 - DNA, 26 bp, Homo sapiens
aaagacgggctccttggtggtggccg

SEQ ID NO: 20487 - DNA, 26 bp, Homo sapiens
aagacgggctccttggtggtggccgc

SEQ ID NO: 20488 - DNA, 26 bp, Homo sapiens
agacgggctccttggtggtggccgct

SEQ ID NO: 20489 - DNA, 26 bp, Homo sapiens
gacgggctccttggtggtggccgctc

SEQ ID NO: 20490 - DNA, 26 bp, Homo sapiens
acgggctccttggtggtggccgctct

SEQ ID NO: 20491 - DNA, 26 bp, Homo sapiens
cgggctccttggtggtggccgctctg

SEQ ID NO: 20492 - DNA, 26 bp, Homo sapiens
gggctccttggtggtggccgctctgt

SEQ ID NO: 20493 - DNA, 26 bp, Homo sapiens
ggctccttggtggtggccgctctgtc

SEQ ID NO: 20494 - DNA, 26 bp, Homo sapiens
gctccttggtggtggccgctctgtca

SEQ ID NO: 20495 - DNA, 26 bp, Homo sapiens
ctccttggtggtggccgctctgtcac

SEQ ID NO: 20496 - DNA, 26 bp, Homo sapiens
tccttggtggtggccgctctgtcact

SEQ ID NO: 20497 - DNA, 26 bp, Homo sapiens
ccttggtggtggccgctctgtcacta

SEQ ID NO: 20498 - DNA, 26 bp, Homo sapiens
cttggtggtggccgctctgtcactaa

SEQ ID NO: 20499 - DNA, 26 bp, Homo sapiens
ttggtggtggccgctctgtcactaaa

SEQ ID NO: 20500 - DNA, 26 bp, Homo sapiens
tggtggtggccgctctgtcactaaag

SEQ ID NO: 20501 - DNA, 26 bp, Homo sapiens
ggtggtggccgctctgtcactaaagc

SEQ ID NO: 20502 - DNA, 26 bp, Homo sapiens
gtggtggccgctctgtcactaaagcc

SEQ ID NO: 20503 - DNA, 26 bp, Homo sapiens
tggtggccgctctgtcactaaagcca

SEQ ID NO: 20504 - DNA, 26 bp, Homo sapiens
ggtggccgctctgtcactaaagccaa

SEQ ID NO: 20505 - DNA, 26 bp, Homo sapiens
gtggccgctctgtcactaaagccaac

SEQ ID NO: 20506 - DNA, 26 bp, Homo sapiens
tggccgctctgtcactaaagccaacc

SEQ ID NO: 20507 - DNA, 26 bp, Homo sapiens
ggccgctctgtcactaaagccaacca

SEQ ID NO: 20508 - DNA, 26 bp, Homo sapiens
gccgctctgtcactaaagccaaccat

SEQ ID NO: 20509 - DNA, 26 bp, Homo sapiens
ccgctctgtcactaaagccaaccata

SEQ ID NO: 20510 - DNA, 26 bp, Homo sapiens
cgctctgtcactaaagccaaccatat

SEQ ID NO: 20511 - DNA, 26 bp, Homo sapiens
gctctgtcactaaagccaaccatatt

SEQ ID NO: 20512 - DNA, 26 bp, Homo sapiens
ctctgtcactaaagccaaccatattc

SEQ ID NO: 20513 - DNA, 26 bp, Homo sapiens
tctgtcactaaagccaaccatattct

SEQ ID NO: 20514 - DNA, 26 bp, Homo sapiens
ctgtcactaaagccaaccatattctg

SEQ ID NO: 20515 - DNA, 26 bp, Homo sapiens
tgtcactaaagccaaccatattctgg

SEQ ID NO: 20516 - DNA, 26 bp, Homo sapiens
gtcactaaagccaaccatattctggc

SEQ ID NO: 20517 - DNA, 26 bp, Homo sapiens
tcactaaagccaaccatattctggct

SEQ ID NO: 20518 - DNA, 26 bp, Homo sapiens
cactaaagccaaccatattctggctg

SEQ ID NO: 20519 - DNA, 26 bp, Homo sapiens
actaaagccaaccatattctggctga

SEQ ID NO: 20520 - DNA, 26 bp, Homo sapiens
ctaaagccaaccatattctggctgaa

SEQ ID NO: 20521 - DNA, 26 bp, Homo sapiens
taaagccaaccatattctggctgaag

SEQ ID NO: 20522 - DNA, 26 bp, Homo sapiens
aaagccaaccatattctggctgaaga

SEQ ID NO: 20523 - DNA, 26 bp, Homo sapiens
aagccaaccatattctggctgaagac

SEQ ID NO: 20524 - DNA, 26 bp, Homo sapiens
agccaaccatattctggctgaagacg

SEQ ID NO: 20525 - DNA, 26 bp, Homo sapiens
gccaaccatattctggctgaagacgc

SEQ ID NO: 20526 - DNA, 26 bp, Homo sapiens
ccaaccatattctggctgaagacgcg

SEQ ID NO: 20527 - DNA, 26 bp, Homo sapiens
caaccatattctggctgaagacgcgg

SEQ ID NO: 20528 - DNA, 26 bp, Homo sapiens
aaccatattctggctgaagacgcgga

SEQ ID NO: 20529 - DNA, 26 bp, Homo sapiens
accatattctggctgaagacgcggaa

SEQ ID NO: 20530 - DNA, 26 bp, Homo sapiens
ccatattctggctgaagacgcggaag

SEQ ID NO: 20531 - DNA, 26 bp, Homo sapiens
catattctggctgaagacgcggaagt

SEQ ID NO: 20532 - DNA, 26 bp, Homo sapiens
atattctggctgaagacgcggaagta

SEQ ID NO: 20533 - DNA, 26 bp, Homo sapiens
tattctggctgaagacgcggaagtag

SEQ ID NO: 20534 - DNA, 26 bp, Homo sapiens
attctggctgaagacgcggaagtagt

SEQ ID NO: 20535 - DNA, 26 bp, Homo sapiens
ttctggctgaagacgcggaagtagta

SEQ ID NO: 20536 - DNA, 26 bp, Homo sapiens
tctggctgaagacgcggaagtagtag

SEQ ID NO: 20537 - DNA, 26 bp, Homo sapiens
ctggctgaagacgcggaagtagtagc

SEQ ID NO: 20538 - DNA, 26 bp, Homo sapiens
tggctgaagacgcggaagtagtagcc

SEQ ID NO: 20539 - DNA, 26 bp, Homo sapiens
ggctgaagacgcggaagtagtagcca

SEQ ID NO: 20540 - DNA, 26 bp, Homo sapiens
gctgaagacgcggaagtagtagccat

SEQ ID NO: 20541 - DNA, 26 bp, Homo sapiens
ctgaagacgcggaagtagtagccatt

SEQ ID NO: 20542 - DNA, 26 bp, Homo sapiens
tgaagacgcggaagtagtagccattg

SEQ ID NO: 20543 - DNA, 26 bp, Homo sapiens
gaagacgcggaagtagtagccattgc

SEQ ID NO: 20544 - DNA, 26 bp, Homo sapiens
aagacgcggaagtagtagccattgcc

SEQ ID NO: 20545 - DNA, 26 bp, Homo sapiens
agacgcggaagtagtagccattgcca

SEQ ID NO: 20546 - DNA, 26 bp, Homo sapiens
gacgcggaagtagtagccattgccaa

SEQ ID NO: 20547 - DNA, 26 bp, Homo sapiens
acgcggaagtagtagccattgccaat

SEQ ID NO: 20548 - DNA, 26 bp, Homo sapiens
cgcggaagtagtagccattgccaatg

SEQ ID NO: 20549 - DNA, 26 bp, Homo sapiens
gcggaagtagtagccattgccaatga

SEQ ID NO: 20550 - DNA, 26 bp, Homo sapiens
cggaagtagtagccattgccaatgat

SEQ ID NO: 20551 - DNA, 26 bp, Homo sapiens
ggaagtagtagccattgccaatgatg

SEQ ID NO: 20552 - DNA, 26 bp, Homo sapiens
gaagtagtagccattgccaatgatga

SEQ ID NO: 20553 - DNA, 26 bp, Homo sapiens
aagtagtagccattgccaatgatgag

SEQ ID NO: 20554 - DNA, 26 bp, Homo sapiens
agtagtagccattgccaatgatgagc

SEQ ID NO: 20555 - DNA, 26 bp, Homo sapiens
gtagtagccattgccaatgatgagct

SEQ ID NO: 20556 - DNA, 26 bp, Homo sapiens
tagtagccattgccaatgatgagctc

SEQ ID NO: 20557 - DNA, 26 bp, Homo sapiens
agtagccattgccaatgatgagctct

SEQ ID NO: 20558 - DNA, 26 bp, Homo sapiens
gtagccattgccaatgatgagctctg

SEQ ID NO: 20559 - DNA, 26 bp, Homo sapiens
tagccattgccaatgatgagctctgg

SEQ ID NO: 20560 - DNA, 26 bp, Homo sapiens
agccattgccaatgatgagctctggc

SEQ ID NO: 20561 - DNA, 26 bp, Homo sapiens
gccattgccaatgatgagctctggca

SEQ ID NO: 20562 - DNA, 26 bp, Homo sapiens
ccattgccaatgatgagctctggcac

SEQ ID NO: 20563 - DNA, 26 bp, Homo sapiens
cattgccaatgatgagctctggcacc

SEQ ID NO: 20564 - DNA, 26 bp, Homo sapiens
attgccaatgatgagctctggcacca

SEQ ID NO: 20565 - DNA, 26 bp, Homo sapiens
ttgccaatgatgagctctggcaccac

SEQ ID NO: 20566 - DNA, 26 bp, Homo sapiens
tgccaatgatgagctctggcaccacg

SEQ ID NO: 20567 - DNA, 26 bp, Homo sapiens
gccaatgatgagctctggcaccacgc

SEQ ID NO: 20568 - DNA, 26 bp, Homo sapiens
ccaatgatgagctctggcaccacgca

SEQ ID NO: 20569 - DNA, 26 bp, Homo sapiens
caatgatgagctctggcaccacgcag

SEQ ID NO: 20570 - DNA, 26 bp, Homo sapiens
aatgatgagctctggcaccacgcagt

SEQ ID NO: 20571 - DNA, 26 bp, Homo sapiens
atgatgagctctggcaccacgcagtg

SEQ ID NO: 20572 - DNA, 26 bp, Homo sapiens
tgatgagctctggcaccacgcagtgg

SEQ ID NO: 20573 - DNA, 26 bp, Homo sapiens
gatgagctctggcaccacgcagtggg

SEQ ID NO: 20574 - DNA, 26 bp, Homo sapiens
atgagctctggcaccacgcagtgggt

SEQ ID NO: 20575 - DNA, 26 bp, Homo sapiens
tgagctctggcaccacgcagtgggtg

SEQ ID NO: 20576 - DNA, 26 bp, Homo sapiens
gagctctggcaccacgcagtgggtgc

SEQ ID NO: 20577 - DNA, 26 bp, Homo sapiens
agctctggcaccacgcagtgggtgcg

SEQ ID NO: 20578 - DNA, 26 bp, Homo sapiens
gctctggcaccacgcagtgggtgcgg

SEQ ID NO: 20579 - DNA, 26 bp, Homo sapiens
ctctggcaccacgcagtgggtgcggc

SEQ ID NO: 20580 - DNA, 26 bp, Homo sapiens
tctggcaccacgcagtgggtgcggcg

SEQ ID NO: 20581 - DNA, 26 bp, Homo sapiens
ctggcaccacgcagtgggtgcggcgg

SEQ ID NO: 20582 - DNA, 26 bp, Homo sapiens
tggcaccacgcagtgggtgcggcggt

SEQ ID NO: 20583 - DNA, 26 bp, Homo sapiens
ggcaccacgcagtgggtgcggcggta

SEQ ID NO: 20584 - DNA, 26 bp, Homo sapiens
gcaccacgcagtgggtgcggcggtaa

SEQ ID NO: 20585 - DNA, 26 bp, Homo sapiens
caccacgcagtgggtgcggcggtaat

SEQ ID NO: 20586 - DNA, 26 bp, Homo sapiens
accacgcagtgggtgcggcggtaatg

SEQ ID NO: 20587 - DNA, 26 bp, Homo sapiens
ccacgcagtgggtgcggcggtaatgc

SEQ ID NO: 20588 - DNA, 26 bp, Homo sapiens
cacgcagtgggtgcggcggtaatgct

SEQ ID NO: 20589 - DNA, 26 bp, Homo sapiens
acgcagtgggtgcggcggtaatgctc

SEQ ID NO: 20590 - DNA, 26 bp, Homo sapiens
cgcagtgggtgcggcggtaatgctcc

SEQ ID NO: 20591 - DNA, 26 bp, Homo sapiens
gcagtgggtgcggcggtaatgctcca

SEQ ID NO: 20592 - DNA, 26 bp, Homo sapiens
cagtgggtgcggcggtaatgctccaa

SEQ ID NO: 20593 - DNA, 26 bp, Homo sapiens
agtgggtgcggcggtaatgctccaag

SEQ ID NO: 20594 - DNA, 26 bp, Homo sapiens
gtgggtgcggcggtaatgctccaaga

SEQ ID NO: 20595 - DNA, 26 bp, Homo sapiens
tgggtgcggcggtaatgctccaagac

SEQ ID NO: 20596 - DNA, 26 bp, Homo sapiens
gggtgcggcggtaatgctccaagacg

SEQ ID NO: 20597 - DNA, 26 bp, Homo sapiens
ggtgcggcggtaatgctccaagacgg

SEQ ID NO: 20598 - DNA, 26 bp, Homo sapiens
gtgcggcggtaatgctccaagacggt

SEQ ID NO: 20599 - DNA, 26 bp, Homo sapiens
tgcggcggtaatgctccaagacggtg

SEQ ID NO: 20600 - DNA, 26 bp, Homo sapiens
gcggcggtaatgctccaagacggtga

SEQ ID NO: 20601 - DNA, 26 bp, Homo sapiens
cggcggtaatgctccaagacggtgaa

SEQ ID NO: 20602 - DNA, 26 bp, Homo sapiens
ggcggtaatgctccaagacggtgaac

SEQ ID NO: 20603 - DNA, 26 bp, Homo sapiens
gcggtaatgctccaagacggtgaacc

SEQ ID NO: 20604 - DNA, 26 bp, Homo sapiens
cggtaatgctccaagacggtgaacca

SEQ ID NO: 20605 - DNA, 26 bp, Homo sapiens
ggtaatgctccaagacggtgaaccac

SEQ ID NO: 20606 - DNA, 26 bp, Homo sapiens
gtaatgctccaagacggtgaaccact

SEQ ID NO: 20607 - DNA, 26 bp, Homo sapiens
taatgctccaagacggtgaaccactc

SEQ ID NO: 20608 - DNA, 26 bp, Homo sapiens
aatgctccaagacggtgaaccactcc

SEQ ID NO: 20609 - DNA, 26 bp, Homo sapiens
atgctccaagacggtgaaccactcca

SEQ ID NO: 20610 - DNA, 26 bp, Homo sapiens
tgctccaagacggtgaaccactccat

SEQ ID NO: 20611 - DNA, 26 bp, Homo sapiens
gctccaagacggtgaaccactccatg

SEQ ID NO: 20612 - DNA, 26 bp, Homo sapiens
ctccaagacggtgaaccactccatgg

SEQ ID NO: 20613 - DNA, 26 bp, Homo sapiens
tccaagacggtgaaccactccatggt

SEQ ID NO: 20614 - DNA, 26 bp, Homo sapiens
ccaagacggtgaaccactccatggtc

SEQ ID NO: 20615 - DNA, 26 bp, Homo sapiens
caagacggtgaaccactccatggtct

SEQ ID NO: 20616 - DNA, 26 bp, Homo sapiens
aagacggtgaaccactccatggtctt

SEQ ID NO: 20617 - DNA, 26 bp, Homo sapiens
agacggtgaaccactccatggtcttc

SEQ ID NO: 20618 - DNA, 26 bp, Homo sapiens
gacggtgaaccactccatggtcttct

SEQ ID NO: 20619 - DNA, 26 bp, Homo sapiens
acggtgaaccactccatggtcttctt

SEQ ID NO: 20620 - DNA, 26 bp, Homo sapiens
cggtgaaccactccatggtcttcttg

SEQ ID NO: 20621 - DNA, 26 bp, Homo sapiens
ggtgaaccactccatggtcttcttgt

SEQ ID NO: 20622 - DNA, 26 bp, Homo sapiens
gtgaaccactccatggtcttcttgtc

SEQ ID NO: 20623 - DNA, 26 bp, Homo sapiens
tgaaccactccatggtcttcttgtcg

SEQ ID NO: 20624 - DNA, 26 bp, Homo sapiens
gaaccactccatggtcttcttgtcgg

SEQ ID NO: 20625 - DNA, 26 bp, Homo sapiens
aaccactccatggtcttcttgtcggc

SEQ ID NO: 20626 - DNA, 26 bp, Homo sapiens
accactccatggtcttcttgtcggct

SEQ ID NO: 20627 - DNA, 26 bp, Homo sapiens
ccactccatggtcttcttgtcggctt

SEQ ID NO: 20628 - DNA, 26 bp, Homo sapiens
cactccatggtcttcttgtcggcttt

SEQ ID NO: 20629 - DNA, 26 bp, Homo sapiens
actccatggtcttcttgtcggctttc

SEQ ID NO: 20630 - DNA, 26 bp, Homo sapiens
ctccatggtcttcttgtcggctttct

SEQ ID NO: 20631 - DNA, 26 bp, Homo sapiens
tccatggtcttcttgtcggctttctg

SEQ ID NO: 20632 - DNA, 26 bp, Homo sapiens
ccatggtcttcttgtcggctttctgc

SEQ ID NO: 20633 - DNA, 26 bp, Homo sapiens
catggtcttcttgtcggctttctgca

SEQ ID NO: 20634 - DNA, 26 bp, Homo sapiens
atggtcttcttgtcggctttctgcac

SEQ ID NO: 20635 - DNA, 26 bp, Homo sapiens
tggtcttcttgtcggctttctgcact

SEQ ID NO: 20636 - DNA, 26 bp, Homo sapiens
ggtcttcttgtcggctttctgcactg

SEQ ID NO: 20637 - DNA, 26 bp, Homo sapiens
gtcttcttgtcggctttctgcactgt

SEQ ID NO: 20638 - DNA, 26 bp, Homo sapiens
tcttcttgtcggctttctgcactgtg

SEQ ID NO: 20639 - DNA, 26 bp, Homo sapiens
cttcttgtcggctttctgcactgtgt

SEQ ID NO: 20640 - DNA, 26 bp, Homo sapiens
ttcttgtcggctttctgcactgtgta

SEQ ID NO: 20641 - DNA, 26 bp, Homo sapiens
tcttgtcggctttctgcactgtgtac

SEQ ID NO: 20642 - DNA, 26 bp, Homo sapiens
cttgtcggctttctgcactgtgtacc

SEQ ID NO: 20643 - DNA, 26 bp, Homo sapiens
ttgtcggctttctgcactgtgtaccc

SEQ ID NO: 20644 - DNA, 26 bp, Homo sapiens
tgtcggctttctgcactgtgtacccc

SEQ ID NO: 20645 - DNA, 26 bp, Homo sapiens
gtcggctttctgcactgtgtaccccc

SEQ ID NO: 20646 - DNA, 26 bp, Homo sapiens
tcggctttctgcactgtgtaccccca

SEQ ID NO: 20647 - DNA, 26 bp, Homo sapiens
cggctttctgcactgtgtacccccag

SEQ ID NO: 20648 - DNA, 26 bp, Homo sapiens
ggctttctgcactgtgtacccccaga

SEQ ID NO: 20649 - DNA, 26 bp, Homo sapiens
gctttctgcactgtgtacccccagag

SEQ ID NO: 20650 - DNA, 26 bp, Homo sapiens
ctttctgcactgtgtacccccagagc

SEQ ID NO: 20651 - DNA, 26 bp, Homo sapiens
tttctgcactgtgtacccccagagct

SEQ ID NO: 20652 - DNA, 26 bp, Homo sapiens
ttctgcactgtgtacccccagagctc

SEQ ID NO: 20653 - DNA, 26 bp, Homo sapiens
tctgcactgtgtacccccagagctcc

SEQ ID NO: 20654 - DNA, 26 bp, Homo sapiens
ctgcactgtgtacccccagagctccg

SEQ ID NO: 20655 - DNA, 26 bp, Homo sapiens
tgcactgtgtacccccagagctccgt

SEQ ID NO: 20656 - DNA, 26 bp, Homo sapiens
gcactgtgtacccccagagctccgtg

SEQ ID NO: 20657 - DNA, 26 bp, Homo sapiens
cactgtgtacccccagagctccgtgt

SEQ ID NO: 20658 - DNA, 26 bp, Homo sapiens
actgtgtacccccagagctccgtgtt

SEQ ID NO: 20659 - DNA, 26 bp, Homo sapiens
ctgtgtacccccagagctccgtgttg

SEQ ID NO: 20660 - DNA, 26 bp, Homo sapiens
tgtgtacccccagagctccgtgttgc

SEQ ID NO: 20661 - DNA, 26 bp, Homo sapiens
gtgtacccccagagctccgtgttgcc

SEQ ID NO: 20662 - DNA, 26 bp, Homo sapiens
tgtacccccagagctccgtgttgccg

SEQ ID NO: 20663 - DNA, 26 bp, Homo sapiens
gtacccccagagctccgtgttgccga

SEQ ID NO: 20664 - DNA, 26 bp, Homo sapiens
tacccccagagctccgtgttgccgac

SEQ ID NO: 20665 - DNA, 26 bp, Homo sapiens
acccccagagctccgtgttgccgaca

SEQ ID NO: 20666 - DNA, 26 bp, Homo sapiens
cccccagagctccgtgttgccgacat

SEQ ID NO: 20667 - DNA, 26 bp, Homo sapiens
ccccagagctccgtgttgccgacatc

SEQ ID NO: 20668 - DNA, 26 bp, Homo sapiens
cccagagctccgtgttgccgacatcc

SEQ ID NO: 20669 - DNA, 26 bp, Homo sapiens
ccagagctccgtgttgccgacatcct

SEQ ID NO: 20670 - DNA, 26 bp, Homo sapiens
cagagctccgtgttgccgacatcctg

SEQ ID NO: 20671 - DNA, 26 bp, Homo sapiens
agagctccgtgttgccgacatcctgg

SEQ ID NO: 20672 - DNA, 26 bp, Homo sapiens
gagctccgtgttgccgacatcctggg

SEQ ID NO: 20673 - DNA, 26 bp, Homo sapiens
agctccgtgttgccgacatcctgggg

SEQ ID NO: 20674 - DNA, 26 bp, Homo sapiens
gctccgtgttgccgacatcctggggt

SEQ ID NO: 20675 - DNA, 26 bp, Homo sapiens
ctccgtgttgccgacatcctggggtg

SEQ ID NO: 20676 - DNA, 26 bp, Homo sapiens
tccgtgttgccgacatcctggggtgg

SEQ ID NO: 20677 - DNA, 26 bp, Homo sapiens
ccgtgttgccgacatcctggggtggc

SEQ ID NO: 20678 - DNA, 26 bp, Homo sapiens
cgtgttgccgacatcctggggtggct

SEQ ID NO: 20679 - DNA, 26 bp, Homo sapiens
gtgttgccgacatcctggggtggctt

SEQ ID NO: 20680 - DNA, 26 bp, Homo sapiens
tgttgccgacatcctggggtggcttc

SEQ ID NO: 20681 - DNA, 26 bp, Homo sapiens
gttgccgacatcctggggtggcttcc

SEQ ID NO: 20682 - DNA, 26 bp, Homo sapiens
ttgccgacatcctggggtggcttcca

SEQ ID NO: 20683 - DNA, 26 bp, Homo sapiens
tgccgacatcctggggtggcttccac

SEQ ID NO: 20684 - DNA, 26 bp, Homo sapiens
gccgacatcctggggtggcttccact

SEQ ID NO: 20685 - DNA, 26 bp, Homo sapiens
ccgacatcctggggtggcttccactc

SEQ ID NO: 20686 - DNA, 26 bp, Homo sapiens
cgacatcctggggtggcttccactcc

SEQ ID NO: 20687 - DNA, 26 bp, Homo sapiens
gacatcctggggtggcttccactcca

SEQ ID NO: 20688 - DNA, 26 bp, Homo sapiens
acatcctggggtggcttccactccag

SEQ ID NO: 20689 - DNA, 26 bp, Homo sapiens
catcctggggtggcttccactccaga

SEQ ID NO: 20690 - DNA, 26 bp, Homo sapiens
atcctggggtggcttccactccagag

SEQ ID NO: 20691 - DNA, 26 bp, Homo sapiens
tcctggggtggcttccactccagagc

SEQ ID NO: 20692 - DNA, 26 bp, Homo sapiens
cctggggtggcttccactccagagcc

SEQ ID NO: 20693 - DNA, 26 bp, Homo sapiens
ctggggtggcttccactccagagcca

SEQ ID NO: 20694 - DNA, 26 bp, Homo sapiens
tggggtggcttccactccagagccac

SEQ ID NO: 20695 - DNA, 26 bp, Homo sapiens
ggggtggcttccactccagagccaca

SEQ ID NO: 20696 - DNA, 26 bp, Homo sapiens
gggtggcttccactccagagccacat

SEQ ID NO: 20697 - DNA, 26 bp, Homo sapiens
ggtggcttccactccagagccacatt

SEQ ID NO: 20698 - DNA, 26 bp, Homo sapiens
gtggcttccactccagagccacatta

SEQ ID NO: 20699 - DNA, 26 bp, Homo sapiens
tggcttccactccagagccacattaa

SEQ ID NO: 20700 - DNA, 26 bp, Homo sapiens
ggcttccactccagagccacattaag

SEQ ID NO: 20701 - DNA, 26 bp, Homo sapiens
gcttccactccagagccacattaaga

SEQ ID NO: 20702 - DNA, 26 bp, Homo sapiens
cttccactccagagccacattaagac

SEQ ID NO: 20703 - DNA, 26 bp, Homo sapiens
ttccactccagagccacattaagacc

SEQ ID NO: 20704 - DNA, 26 bp, Homo sapiens
tccactccagagccacattaagaccc

SEQ ID NO: 20705 - DNA, 26 bp, Homo sapiens
ccactccagagccacattaagacccc

SEQ ID NO: 20706 - DNA, 26 bp, Homo sapiens
cactccagagccacattaagacccca

SEQ ID NO: 20707 - DNA, 26 bp, Homo sapiens
actccagagccacattaagaccccag

SEQ ID NO: 20708 - DNA, 26 bp, Homo sapiens
ctccagagccacattaagaccccagg

SEQ ID NO: 20709 - DNA, 26 bp, Homo sapiens
tccagagccacattaagaccccaggc

SEQ ID NO: 20710 - DNA, 26 bp, Homo sapiens
ccagagccacattaagaccccaggcg

SEQ ID NO: 20711 - DNA, 26 bp, Homo sapiens
cagagccacattaagaccccaggcgt

SEQ ID NO: 20712 - DNA, 26 bp, Homo sapiens
agagccacattaagaccccaggcgtc

SEQ ID NO: 20713 - DNA, 26 bp, Homo sapiens
gagccacattaagaccccaggcgtca

SEQ ID NO: 20714 - DNA, 26 bp, Homo sapiens
agccacattaagaccccaggcgtcag

SEQ ID NO: 20715 - DNA, 26 bp, Homo sapiens
gccacattaagaccccaggcgtcagt

SEQ ID NO: 20716 - DNA, 26 bp, Homo sapiens
ccacattaagaccccaggcgtcagtc

SEQ ID NO: 20717 - DNA, 26 bp, Homo sapiens
cacattaagaccccaggcgtcagtca

SEQ ID NO: 20718 - DNA, 26 bp, Homo sapiens
acattaagaccccaggcgtcagtcac

SEQ ID NO: 20719 - DNA, 26 bp, Homo sapiens
cattaagaccccaggcgtcagtcacc

SEQ ID NO: 20720 - DNA, 26 bp, Homo sapiens
attaagaccccaggcgtcagtcaccc

SEQ ID NO: 20721 - DNA, 26 bp, Homo sapiens
ttaagaccccaggcgtcagtcacccg

SEQ ID NO: 20722 - DNA, 26 bp, Homo sapiens
taagaccccaggcgtcagtcacccgg

SEQ ID NO: 20723 - DNA, 26 bp, Homo sapiens
aagaccccaggcgtcagtcacccgga

SEQ ID NO: 20724 - DNA, 26 bp, Homo sapiens
agaccccaggcgtcagtcacccggag

SEQ ID NO: 20725 - DNA, 26 bp, Homo sapiens
gaccccaggcgtcagtcacccggaga

SEQ ID NO: 20726 - DNA, 26 bp, Homo sapiens
accccaggcgtcagtcacccggagat

SEQ ID NO: 20727 - DNA, 26 bp, Homo sapiens
ccccaggcgtcagtcacccggagatc

SEQ ID NO: 20728 - DNA, 26 bp, Homo sapiens
cccaggcgtcagtcacccggagatcc

SEQ ID NO: 20729 - DNA, 26 bp, Homo sapiens
ccaggcgtcagtcacccggagatcct

SEQ ID NO: 20730 - DNA, 26 bp, Homo sapiens
caggcgtcagtcacccggagatcctg

SEQ ID NO: 20731 - DNA, 26 bp, Homo sapiens
aggcgtcagtcacccggagatcctgg

SEQ ID NO: 20732 - DNA, 26 bp, Homo sapiens
ggcgtcagtcacccggagatcctggg

SEQ ID NO: 20733 - DNA, 26 bp, Homo sapiens
gcgtcagtcacccggagatcctgggg

SEQ ID NO: 20734 - DNA, 26 bp, Homo sapiens
cgtcagtcacccggagatcctgggga

SEQ ID NO: 20735 - DNA, 26 bp, Homo sapiens
gtcagtcacccggagatcctggggag

SEQ ID NO: 20736 - DNA, 26 bp, Homo sapiens
tcagtcacccggagatcctggggagg

SEQ ID NO: 20737 - DNA, 26 bp, Homo sapiens
cagtcacccggagatcctggggagga

SEQ ID NO: 20738 - DNA, 26 bp, Homo sapiens
agtcacccggagatcctggggaggac

SEQ ID NO: 20739 - DNA, 26 bp, Homo sapiens
gtcacccggagatcctggggaggact

SEQ ID NO: 20740 - DNA, 26 bp, Homo sapiens
tcacccggagatcctggggaggactt

SEQ ID NO: 20741 - DNA, 26 bp, Homo sapiens
cacccggagatcctggggaggacttg

SEQ ID NO: 20742 - DNA, 26 bp, Homo sapiens
acccggagatcctggggaggacttgg

SEQ ID NO: 20743 - DNA, 26 bp, Homo sapiens
cccggagatcctggggaggacttggc

SEQ ID NO: 20744 - DNA, 26 bp, Homo sapiens
ccggagatcctggggaggacttggct

SEQ ID NO: 20745 - DNA, 26 bp, Homo sapiens
cggagatcctggggaggacttggctt

SEQ ID NO: 20746 - DNA, 26 bp, Homo sapiens
ggagatcctggggaggacttggcttg

SEQ ID NO: 20747 - DNA, 26 bp, Homo sapiens
gagatcctggggaggacttggcttgt

SEQ ID NO: 20748 - DNA, 26 bp, Homo sapiens
agatcctggggaggacttggcttgtc

SEQ ID NO: 20749 - DNA, 26 bp, Homo sapiens
gatcctggggaggacttggcttgtca

SEQ ID NO: 20750 - DNA, 26 bp, Homo sapiens
atcctggggaggacttggcttgtcaa

SEQ ID NO: 20751 - DNA, 26 bp, Homo sapiens
tcctggggaggacttggcttgtcaac

SEQ ID NO: 20752 - DNA, 26 bp, Homo sapiens
cctggggaggacttggcttgtcaaca

SEQ ID NO: 20753 - DNA, 26 bp, Homo sapiens
ctggggaggacttggcttgtcaacaa

SEQ ID NO: 20754 - DNA, 26 bp, Homo sapiens
tggggaggacttggcttgtcaacaac

SEQ ID NO: 20755 - DNA, 26 bp, Homo sapiens
ggggaggacttggcttgtcaacaacc

SEQ ID NO: 20756 - DNA, 26 bp, Homo sapiens
gggaggacttggcttgtcaacaacct

SEQ ID NO: 20757 - DNA, 26 bp, Homo sapiens
ggaggacttggcttgtcaacaacctg

SEQ ID NO: 20758 - DNA, 26 bp, Homo sapiens
gaggacttggcttgtcaacaacctgc

SEQ ID NO: 20759 - DNA, 26 bp, Homo sapiens
aggacttggcttgtcaacaacctgca

SEQ ID NO: 20760 - DNA, 26 bp, Homo sapiens
ggacttggcttgtcaacaacctgcag

SEQ ID NO: 20761 - DNA, 26 bp, Homo sapiens
gacttggcttgtcaacaacctgcagc

SEQ ID NO: 20762 - DNA, 26 bp, Homo sapiens
acttggcttgtcaacaacctgcagca

SEQ ID NO: 20763 - DNA, 26 bp, Homo sapiens
cttggcttgtcaacaacctgcagcac

SEQ ID NO: 20764 - DNA, 26 bp, Homo sapiens
ttggcttgtcaacaacctgcagcacc

SEQ ID NO: 20765 - DNA, 26 bp, Homo sapiens
tggcttgtcaacaacctgcagcacca

SEQ ID NO: 20766 - DNA, 26 bp, Homo sapiens
ggcttgtcaacaacctgcagcaccag

SEQ ID NO: 20767 - DNA, 26 bp, Homo sapiens
gcttgtcaacaacctgcagcaccagc

SEQ ID NO: 20768 - DNA, 26 bp, Homo sapiens
cttgtcaacaacctgcagcaccagcg

SEQ ID NO: 20769 - DNA, 26 bp, Homo sapiens
ttgtcaacaacctgcagcaccagcgt

SEQ ID NO: 20770 - DNA, 26 bp, Homo sapiens
tgtcaacaacctgcagcaccagcgtg

SEQ ID NO: 20771 - DNA, 26 bp, Homo sapiens
gtcaacaacctgcagcaccagcgtgg

SEQ ID NO: 20772 - DNA, 26 bp, Homo sapiens
tcaacaacctgcagcaccagcgtggc

SEQ ID NO: 20773 - DNA, 26 bp, Homo sapiens
caacaacctgcagcaccagcgtggcc

SEQ ID NO: 20774 - DNA, 26 bp, Homo sapiens
aacaacctgcagcaccagcgtggcct

SEQ ID NO: 20775 - DNA, 26 bp, Homo sapiens
acaacctgcagcaccagcgtggcctt

SEQ ID NO: 20776 - DNA, 26 bp, Homo sapiens
caacctgcagcaccagcgtggccttg

SEQ ID NO: 20777 - DNA, 26 bp, Homo sapiens
aacctgcagcaccagcgtggccttgt

SEQ ID NO: 20778 - DNA, 26 bp, Homo sapiens
acctgcagcaccagcgtggccttgtc

SEQ ID NO: 20779 - DNA, 26 bp, Homo sapiens
cctgcagcaccagcgtggccttgtcc

SEQ ID NO: 20780 - DNA, 26 bp, Homo sapiens
ctgcagcaccagcgtggccttgtcct

SEQ ID NO: 20781 - DNA, 26 bp, Homo sapiens
tgcagcaccagcgtggccttgtcctc

SEQ ID NO: 20782 - DNA, 26 bp, Homo sapiens
gcagcaccagcgtggccttgtcctcc

SEQ ID NO: 20783 - DNA, 26 bp, Homo sapiens
cagcaccagcgtggccttgtcctcca

SEQ ID NO: 20784 - DNA, 26 bp, Homo sapiens
agcaccagcgtggccttgtcctccat

SEQ ID NO: 20785 - DNA, 26 bp, Homo sapiens
gcaccagcgtggccttgtcctccatg

SEQ ID NO: 20786 - DNA, 26 bp, Homo sapiens
caccagcgtggccttgtcctccatgt

SEQ ID NO: 20787 - DNA, 26 bp, Homo sapiens
accagcgtggccttgtcctccatgtt

SEQ ID NO: 20788 - DNA, 26 bp, Homo sapiens
ccagcgtggccttgtcctccatgttc

SEQ ID NO: 20789 - DNA, 26 bp, Homo sapiens
cagcgtggccttgtcctccatgttct

SEQ ID NO: 20790 - DNA, 26 bp, Homo sapiens
agcgtggccttgtcctccatgttctc

SEQ ID NO: 20791 - DNA, 26 bp, Homo sapiens
gcgtggccttgtcctccatgttctca

SEQ ID NO: 20792 - DNA, 26 bp, Homo sapiens
cgtggccttgtcctccatgttctcaa

SEQ ID NO: 20793 - DNA, 26 bp, Homo sapiens
gtggccttgtcctccatgttctcaat

SEQ ID NO: 20794 - DNA, 26 bp, Homo sapiens
tggccttgtcctccatgttctcaatg

SEQ ID NO: 20795 - DNA, 26 bp, Homo sapiens
ggccttgtcctccatgttctcaatgc

SEQ ID NO: 20796 - DNA, 26 bp, Homo sapiens
gccttgtcctccatgttctcaatgcg

SEQ ID NO: 20797 - DNA, 26 bp, Homo sapiens
ccttgtcctccatgttctcaatgcgc

SEQ ID NO: 20798 - DNA, 26 bp, Homo sapiens
cttgtcctccatgttctcaatgcgca

SEQ ID NO: 20799 - DNA, 26 bp, Homo sapiens
ttgtcctccatgttctcaatgcgcac

SEQ ID NO: 20800 - DNA, 26 bp, Homo sapiens
tgtcctccatgttctcaatgcgcacc

SEQ ID NO: 20801 - DNA, 26 bp, Homo sapiens
gtcctccatgttctcaatgcgcaccg

SEQ ID NO: 20802 - DNA, 26 bp, Homo sapiens
tcctccatgttctcaatgcgcaccgt

SEQ ID NO: 20803 - DNA, 26 bp, Homo sapiens
cctccatgttctcaatgcgcaccgtc

SEQ ID NO: 20804 - DNA, 26 bp, Homo sapiens
ctccatgttctcaatgcgcaccgtca

SEQ ID NO: 20805 - DNA, 26 bp, Homo sapiens
tccatgttctcaatgcgcaccgtcac

SEQ ID NO: 20806 - DNA, 26 bp, Homo sapiens
ccatgttctcaatgcgcaccgtcacc

SEQ ID NO: 20807 - DNA, 26 bp, Homo sapiens
catgttctcaatgcgcaccgtcacct

SEQ ID NO: 20808 - DNA, 26 bp, Homo sapiens
atgttctcaatgcgcaccgtcacctg

SEQ ID NO: 20809 - DNA, 26 bp, Homo sapiens
tgttctcaatgcgcaccgtcacctgg

SEQ ID NO: 20810 - DNA, 26 bp, Homo sapiens
gttctcaatgcgcaccgtcacctggt

SEQ ID NO: 20811 - DNA, 26 bp, Homo sapiens
ttctcaatgcgcaccgtcacctggta

SEQ ID NO: 20812 - DNA, 26 bp, Homo sapiens
tctcaatgcgcaccgtcacctggtaa

SEQ ID NO: 20813 - DNA, 26 bp, Homo sapiens
ctcaatgcgcaccgtcacctggtaag

SEQ ID NO: 20814 - DNA, 26 bp, Homo sapiens
tcaatgcgcaccgtcacctggtaagt

SEQ ID NO: 20815 - DNA, 26 bp, Homo sapiens
caatgcgcaccgtcacctggtaagtg

SEQ ID NO: 20816 - DNA, 26 bp, Homo sapiens
aatgcgcaccgtcacctggtaagtgc

SEQ ID NO: 20817 - DNA, 26 bp, Homo sapiens
atgcgcaccgtcacctggtaagtgcc

SEQ ID NO: 20818 - DNA, 26 bp, Homo sapiens
tgcgcaccgtcacctggtaagtgcct

SEQ ID NO: 20819 - DNA, 26 bp, Homo sapiens
gcgcaccgtcacctggtaagtgcctg

SEQ ID NO: 20820 - DNA, 26 bp, Homo sapiens
cgcaccgtcacctggtaagtgcctga

SEQ ID NO: 20821 - DNA, 26 bp, Homo sapiens
gcaccgtcacctggtaagtgcctgaa

SEQ ID NO: 20822 - DNA, 26 bp, Homo sapiens
caccgtcacctggtaagtgcctgaat

SEQ ID NO: 20823 - DNA, 26 bp, Homo sapiens
accgtcacctggtaagtgcctgaatg

SEQ ID NO: 20824 - DNA, 26 bp, Homo sapiens
ccgtcacctggtaagtgcctgaatgc

SEQ ID NO: 20825 - DNA, 26 bp, Homo sapiens
cgtcacctggtaagtgcctgaatgca

SEQ ID NO: 20826 - DNA, 26 bp, Homo sapiens
gtcacctggtaagtgcctgaatgcac

SEQ ID NO: 20827 - DNA, 26 bp, Homo sapiens
tcacctggtaagtgcctgaatgcacg

SEQ ID NO: 20828 - DNA, 26 bp, Homo sapiens
cacctggtaagtgcctgaatgcacgc

SEQ ID NO: 20829 - DNA, 26 bp, Homo sapiens
acctggtaagtgcctgaatgcacgcg

SEQ ID NO: 20830 - DNA, 26 bp, Homo sapiens
cctggtaagtgcctgaatgcacgcgg

SEQ ID NO: 20831 - DNA, 26 bp, Homo sapiens
ctggtaagtgcctgaatgcacgcggc

SEQ ID NO: 20832 - DNA, 26 bp, Homo sapiens
tggtaagtgcctgaatgcacgcggcg

SEQ ID NO: 20833 - DNA, 26 bp, Homo sapiens
ggtaagtgcctgaatgcacgcggcga

SEQ ID NO: 20834 - DNA, 26 bp, Homo sapiens
gtaagtgcctgaatgcacgcggcgag

SEQ ID NO: 20835 - DNA, 26 bp, Homo sapiens
taagtgcctgaatgcacgcggcgagc

SEQ ID NO: 20836 - DNA, 26 bp, Homo sapiens
aagtgcctgaatgcacgcggcgagcg

SEQ ID NO: 20837 - DNA, 26 bp, Homo sapiens
agtgcctgaatgcacgcggcgagcgg

SEQ ID NO: 20838 - DNA, 26 bp, Homo sapiens
gtgcctgaatgcacgcggcgagcggc

SEQ ID NO: 20839 - DNA, 26 bp, Homo sapiens
tgcctgaatgcacgcggcgagcggcc

SEQ ID NO: 20840 - DNA, 26 bp, Homo sapiens
gcctgaatgcacgcggcgagcggccc

SEQ ID NO: 20841 - DNA, 26 bp, Homo sapiens
cctgaatgcacgcggcgagcggcccg

SEQ ID NO: 20842 - DNA, 26 bp, Homo sapiens
ctgaatgcacgcggcgagcggcccgg

SEQ ID NO: 20843 - DNA, 26 bp, Homo sapiens
tgaatgcacgcggcgagcggcccgga

SEQ ID NO: 20844 - DNA, 26 bp, Homo sapiens
gaatgcacgcggcgagcggcccggat

SEQ ID NO: 20845 - DNA, 26 bp, Homo sapiens
aatgcacgcggcgagcggcccggatg

SEQ ID NO: 20846 - DNA, 26 bp, Homo sapiens
atgcacgcggcgagcggcccggatga

SEQ ID NO: 20847 - DNA, 26 bp, Homo sapiens
tgcacgcggcgagcggcccggatgaa

SEQ ID NO: 20848 - DNA, 26 bp, Homo sapiens
gcacgcggcgagcggcccggatgaac

SEQ ID NO: 20849 - DNA, 26 bp, Homo sapiens
cacgcggcgagcggcccggatgaaca

SEQ ID NO: 20850 - DNA, 26 bp, Homo sapiens
acgcggcgagcggcccggatgaacag

SEQ ID NO: 20851 - DNA, 26 bp, Homo sapiens
cgcggcgagcggcccggatgaacagg

SEQ ID NO: 20852 - DNA, 26 bp, Homo sapiens
gcggcgagcggcccggatgaacagga

SEQ ID NO: 20853 - DNA, 26 bp, Homo sapiens
cggcgagcggcccggatgaacaggat

SEQ ID NO: 20854 - DNA, 26 bp, Homo sapiens
ggcgagcggcccggatgaacaggatg

SEQ ID NO: 20855 - DNA, 26 bp, Homo sapiens
gcgagcggcccggatgaacaggatgg

SEQ ID NO: 20856 - DNA, 26 bp, Homo sapiens
cgagcggcccggatgaacaggatggt

SEQ ID NO: 20857 - DNA, 26 bp, Homo sapiens
gagcggcccggatgaacaggatggtg

SEQ ID NO: 20858 - DNA, 26 bp, Homo sapiens
agcggcccggatgaacaggatggtgt

SEQ ID NO: 20859 - DNA, 26 bp, Homo sapiens
gcggcccggatgaacaggatggtgtc

SEQ ID NO: 20860 - DNA, 26 bp, Homo sapiens
cggcccggatgaacaggatggtgtct

SEQ ID NO: 20861 - DNA, 26 bp, Homo sapiens
ggcccggatgaacaggatggtgtctg

SEQ ID NO: 20862 - DNA, 26 bp, Homo sapiens
gcccggatgaacaggatggtgtctgt

SEQ ID NO: 20863 - DNA, 26 bp, Homo sapiens
cccggatgaacaggatggtgtctgtg

SEQ ID NO: 20864 - DNA, 26 bp, Homo sapiens
ccggatgaacaggatggtgtctgtgg

SEQ ID NO: 20865 - DNA, 26 bp, Homo sapiens
cggatgaacaggatggtgtctgtggg

SEQ ID NO: 20866 - DNA, 26 bp, Homo sapiens
ggatgaacaggatggtgtctgtgggg

SEQ ID NO: 20867 - DNA, 26 bp, Homo sapiens
gatgaacaggatggtgtctgtggggc

SEQ ID NO: 20868 - DNA, 26 bp, Homo sapiens
atgaacaggatggtgtctgtggggct

SEQ ID NO: 20869 - DNA, 26 bp, Homo sapiens
tgaacaggatggtgtctgtggggctg

SEQ ID NO: 20870 - DNA, 26 bp, Homo sapiens
gaacaggatggtgtctgtggggctgt

SEQ ID NO: 20871 - DNA, 26 bp, Homo sapiens
aacaggatggtgtctgtggggctgtt

SEQ ID NO: 20872 - DNA, 26 bp, Homo sapiens
acaggatggtgtctgtggggctgttg

SEQ ID NO: 20873 - DNA, 26 bp, Homo sapiens
caggatggtgtctgtggggctgttgc

SEQ ID NO: 20874 - DNA, 26 bp, Homo sapiens
aggatggtgtctgtggggctgttgcg

SEQ ID NO: 20875 - DNA, 26 bp, Homo sapiens
ggatggtgtctgtggggctgttgcgg

SEQ ID NO: 20876 - DNA, 26 bp, Homo sapiens
gatggtgtctgtggggctgttgcgga

SEQ ID NO: 20877 - DNA, 26 bp, Homo sapiens
atggtgtctgtggggctgttgcggat

SEQ ID NO: 20878 - DNA, 26 bp, Homo sapiens
tggtgtctgtggggctgttgcggatg

SEQ ID NO: 20879 - DNA, 26 bp, Homo sapiens
ggtgtctgtggggctgttgcggatgc

SEQ ID NO: 20880 - DNA, 26 bp, Homo sapiens
gtgtctgtggggctgttgcggatgct

SEQ ID NO: 20881 - DNA, 26 bp, Homo sapiens
tgtctgtggggctgttgcggatgctc

SEQ ID NO: 20882 - DNA, 26 bp, Homo sapiens
gtctgtggggctgttgcggatgctca

SEQ ID NO: 20883 - DNA, 26 bp, Homo sapiens
tctgtggggctgttgcggatgctcac

SEQ ID NO: 20884 - DNA, 26 bp, Homo sapiens
ctgtggggctgttgcggatgctcacc

SEQ ID NO: 20885 - DNA, 26 bp, Homo sapiens
tgtggggctgttgcggatgctcacct

SEQ ID NO: 20886 - DNA, 26 bp, Homo sapiens
gtggggctgttgcggatgctcacctc

SEQ ID NO: 20887 - DNA, 26 bp, Homo sapiens
tggggctgttgcggatgctcacctcc

SEQ ID NO: 20888 - DNA, 26 bp, Homo sapiens
ggggctgttgcggatgctcacctcct

SEQ ID NO: 20889 - DNA, 26 bp, Homo sapiens
gggctgttgcggatgctcacctcctc

SEQ ID NO: 20890 - DNA, 26 bp, Homo sapiens
ggctgttgcggatgctcacctcctcg

SEQ ID NO: 20891 - DNA, 26 bp, Homo sapiens
gctgttgcggatgctcacctcctcgc

SEQ ID NO: 20892 - DNA, 26 bp, Homo sapiens
ctgttgcggatgctcacctcctcgcc

SEQ ID NO: 20893 - DNA, 26 bp, Homo sapiens
tgttgcggatgctcacctcctcgcct

SEQ ID NO: 20894 - DNA, 26 bp, Homo sapiens
gttgcggatgctcacctcctcgcctg

SEQ ID NO: 20895 - DNA, 26 bp, Homo sapiens
ttgcggatgctcacctcctcgcctgc

SEQ ID NO: 20896 - DNA, 26 bp, Homo sapiens
tgcggatgctcacctcctcgcctgcc

SEQ ID NO: 20897 - DNA, 26 bp, Homo sapiens
gcggatgctcacctcctcgcctgcca

SEQ ID NO: 20898 - DNA, 26 bp, Homo sapiens
cggatgctcacctcctcgcctgccag

SEQ ID NO: 20899 - DNA, 26 bp, Homo sapiens
ggatgctcacctcctcgcctgccagg

SEQ ID NO: 20900 - DNA, 26 bp, Homo sapiens
gatgctcacctcctcgcctgccaggg

SEQ ID NO: 20901 - DNA, 26 bp, Homo sapiens
atgctcacctcctcgcctgccagggg

SEQ ID NO: 20902 - DNA, 26 bp, Homo sapiens
tgctcacctcctcgcctgccaggggc

SEQ ID NO: 20903 - DNA, 26 bp, Homo sapiens
gctcacctcctcgcctgccaggggct

SEQ ID NO: 20904 - DNA, 26 bp, Homo sapiens
ctcacctcctcgcctgccaggggctg

SEQ ID NO: 20905 - DNA, 26 bp, Homo sapiens
tcacctcctcgcctgccaggggctgc

SEQ ID NO: 20906 - DNA, 26 bp, Homo sapiens
cacctcctcgcctgccaggggctgcc

SEQ ID NO: 20907 - DNA, 26 bp, Homo sapiens
acctcctcgcctgccaggggctgccc

SEQ ID NO: 20908 - DNA, 26 bp, Homo sapiens
cctcctcgcctgccaggggctgcccc

SEQ ID NO: 20909 - DNA, 26 bp, Homo sapiens
ctcctcgcctgccaggggctgcccct

SEQ ID NO: 20910 - DNA, 26 bp, Homo sapiens
tcctcgcctgccaggggctgcccctc

SEQ ID NO: 20911 - DNA, 26 bp, Homo sapiens
cctcgcctgccaggggctgcccctct

SEQ ID NO: 20912 - DNA, 26 bp, Homo sapiens
ctcgcctgccaggggctgcccctctt

SEQ ID NO: 20913 - DNA, 26 bp, Homo sapiens
tcgcctgccaggggctgcccctcttt

SEQ ID NO: 20914 - DNA, 26 bp, Homo sapiens
cgcctgccaggggctgcccctctttg

SEQ ID NO: 20915 - DNA, 26 bp, Homo sapiens
gcctgccaggggctgcccctctttgg

SEQ ID NO: 20916 - DNA, 26 bp, Homo sapiens
cctgccaggggctgcccctctttggt

SEQ ID NO: 20917 - DNA, 26 bp, Homo sapiens
ctgccaggggctgcccctctttggtc

SEQ ID NO: 20918 - DNA, 26 bp, Homo sapiens
tgccaggggctgcccctctttggtcc

SEQ ID NO: 20919 - DNA, 26 bp, Homo sapiens
gccaggggctgcccctctttggtcca

SEQ ID NO: 20920 - DNA, 26 bp, Homo sapiens
ccaggggctgcccctctttggtccag

SEQ ID NO: 20921 - DNA, 26 bp, Homo sapiens
caggggctgcccctctttggtccagg

SEQ ID NO: 20922 - DNA, 26 bp, Homo sapiens
aggggctgcccctctttggtccaggt

SEQ ID NO: 20923 - DNA, 26 bp, Homo sapiens
ggggctgcccctctttggtccaggtc

SEQ ID NO: 20924 - DNA, 26 bp, Homo sapiens
gggctgcccctctttggtccaggtca

SEQ ID NO: 20925 - DNA, 26 bp, Homo sapiens
ggctgcccctctttggtccaggtcac

SEQ ID NO: 20926 - DNA, 26 bp, Homo sapiens
gctgcccctctttggtccaggtcacc

SEQ ID NO: 20927 - DNA, 26 bp, Homo sapiens
ctgcccctctttggtccaggtcacct

SEQ ID NO: 20928 - DNA, 26 bp, Homo sapiens
tgcccctctttggtccaggtcacctg

SEQ ID NO: 20929 - DNA, 26 bp, Homo sapiens
gcccctctttggtccaggtcacctga

SEQ ID NO: 20930 - DNA, 26 bp, Homo sapiens
cccctctttggtccaggtcacctgag

SEQ ID NO: 20931 - DNA, 26 bp, Homo sapiens
ccctctttggtccaggtcacctgagg

SEQ ID NO: 20932 - DNA, 26 bp, Homo sapiens
cctctttggtccaggtcacctgaggc

SEQ ID NO: 20933 - DNA, 26 bp, Homo sapiens
ctctttggtccaggtcacctgaggcc

SEQ ID NO: 20934 - DNA, 26 bp, Homo sapiens
tctttggtccaggtcacctgaggccg

SEQ ID NO: 20935 - DNA, 26 bp, Homo sapiens
ctttggtccaggtcacctgaggccgg

SEQ ID NO: 20936 - DNA, 26 bp, Homo sapiens
tttggtccaggtcacctgaggccggg

SEQ ID NO: 20937 - DNA, 26 bp, Homo sapiens
ttggtccaggtcacctgaggccgggg

SEQ ID NO: 20938 - DNA, 26 bp, Homo sapiens
tggtccaggtcacctgaggccggggc

SEQ ID NO: 20939 - DNA, 26 bp, Homo sapiens
ggtccaggtcacctgaggccggggct

SEQ ID NO: 20940 - DNA, 26 bp, Homo sapiens
gtccaggtcacctgaggccggggctt

SEQ ID NO: 20941 - DNA, 26 bp, Homo sapiens
tccaggtcacctgaggccggggcttg

SEQ ID NO: 20942 - DNA, 26 bp, Homo sapiens
ccaggtcacctgaggccggggcttgc

SEQ ID NO: 20943 - DNA, 26 bp, Homo sapiens
caggtcacctgaggccggggcttgcc

SEQ ID NO: 20944 - DNA, 26 bp, Homo sapiens
aggtcacctgaggccggggcttgccc

SEQ ID NO: 20945 - DNA, 26 bp, Homo sapiens
ggtcacctgaggccggggcttgccct

SEQ ID NO: 20946 - DNA, 26 bp, Homo sapiens
gtcacctgaggccggggcttgccctg

SEQ ID NO: 20947 - DNA, 26 bp, Homo sapiens
tcacctgaggccggggcttgccctgg

SEQ ID NO: 20948 - DNA, 26 bp, Homo sapiens
cacctgaggccggggcttgccctgga

SEQ ID NO: 20949 - DNA, 26 bp, Homo sapiens
acctgaggccggggcttgccctggaa

SEQ ID NO: 20950 - DNA, 26 bp, Homo sapiens
cctgaggccggggcttgccctggaaa

SEQ ID NO: 20951 - DNA, 26 bp, Homo sapiens
ctgaggccggggcttgccctggaaag

SEQ ID NO: 20952 - DNA, 26 bp, Homo sapiens
tgaggccggggcttgccctggaaagg

SEQ ID NO: 20953 - DNA, 26 bp, Homo sapiens
gaggccggggcttgccctggaaaggg

SEQ ID NO: 20954 - DNA, 26 bp, Homo sapiens
aggccggggcttgccctggaaaggga

SEQ ID NO: 20955 - DNA, 26 bp, Homo sapiens
ggccggggcttgccctggaaagggat

SEQ ID NO: 20956 - DNA, 26 bp, Homo sapiens
gccggggcttgccctggaaagggatg

SEQ ID NO: 20957 - DNA, 26 bp, Homo sapiens
ccggggcttgccctggaaagggatga

SEQ ID NO: 20958 - DNA, 26 bp, Homo sapiens
cggggcttgccctggaaagggatgag

SEQ ID NO: 20959 - DNA, 26 bp, Homo sapiens
ggggcttgccctggaaagggatgaga

SEQ ID NO: 20960 - DNA, 26 bp, Homo sapiens
gggcttgccctggaaagggatgagaa

SEQ ID NO: 20961 - DNA, 26 bp, Homo sapiens
ggcttgccctggaaagggatgagaag

SEQ ID NO: 20962 - DNA, 26 bp, Homo sapiens
gcttgccctggaaagggatgagaagg

SEQ ID NO: 20963 - DNA, 26 bp, Homo sapiens
cttgccctggaaagggatgagaaggt

SEQ ID NO: 20964 - DNA, 26 bp, Homo sapiens
ttgccctggaaagggatgagaaggtt

SEQ ID NO: 20965 - DNA, 26 bp, Homo sapiens
tgccctggaaagggatgagaaggttc

SEQ ID NO: 20966 - DNA, 26 bp, Homo sapiens
gccctggaaagggatgagaaggttca

SEQ ID NO: 20967 - DNA, 26 bp, Homo sapiens
ccctggaaagggatgagaaggttcac

SEQ ID NO: 20968 - DNA, 26 bp, Homo sapiens
cctggaaagggatgagaaggttcaca

SEQ ID NO: 20969 - DNA, 26 bp, Homo sapiens
ctggaaagggatgagaaggttcacag

SEQ ID NO: 20970 - DNA, 26 bp, Homo sapiens
tggaaagggatgagaaggttcacagg

SEQ ID NO: 20971 - DNA, 26 bp, Homo sapiens
ggaaagggatgagaaggttcacaggc

SEQ ID NO: 20972 - DNA, 26 bp, Homo sapiens
gaaagggatgagaaggttcacaggct

SEQ ID NO: 20973 - DNA, 26 bp, Homo sapiens
aaagggatgagaaggttcacaggctc

SEQ ID NO: 20974 - DNA, 26 bp, Homo sapiens
aagggatgagaaggttcacaggctcc

SEQ ID NO: 20975 - DNA, 26 bp, Homo sapiens
agggatgagaaggttcacaggctccc

SEQ ID NO: 20976 - DNA, 26 bp, Homo sapiens
gggatgagaaggttcacaggctcccc

SEQ ID NO: 20977 - DNA, 26 bp, Homo sapiens
ggatgagaaggttcacaggctccccg

SEQ ID NO: 20978 - DNA, 26 bp, Homo sapiens
gatgagaaggttcacaggctccccga

SEQ ID NO: 20979 - DNA, 26 bp, Homo sapiens
atgagaaggttcacaggctccccgac

SEQ ID NO: 20980 - DNA, 26 bp, Homo sapiens
tgagaaggttcacaggctccccgacc

SEQ ID NO: 20981 - DNA, 26 bp, Homo sapiens
gagaaggttcacaggctccccgacct

SEQ ID NO: 20982 - DNA, 26 bp, Homo sapiens
agaaggttcacaggctccccgacctt

SEQ ID NO: 20983 - DNA, 26 bp, Homo sapiens
gaaggttcacaggctccccgaccttc

SEQ ID NO: 20984 - DNA, 26 bp, Homo sapiens
aaggttcacaggctccccgaccttct

SEQ ID NO: 20985 - DNA, 26 bp, Homo sapiens
aggttcacaggctccccgaccttctt

SEQ ID NO: 20986 - DNA, 26 bp, Homo sapiens
ggttcacaggctccccgaccttcttc

SEQ ID NO: 20987 - DNA, 26 bp, Homo sapiens
gttcacaggctccccgaccttcttct

SEQ ID NO: 20988 - DNA, 26 bp, Homo sapiens
ttcacaggctccccgaccttcttctg

SEQ ID NO: 20989 - DNA, 26 bp, Homo sapiens
tcacaggctccccgaccttcttctga

SEQ ID NO: 20990 - DNA, 26 bp, Homo sapiens
cacaggctccccgaccttcttctgaa

SEQ ID NO: 20991 - DNA, 26 bp, Homo sapiens
acaggctccccgaccttcttctgaat

SEQ ID NO: 20992 - DNA, 26 bp, Homo sapiens
caggctccccgaccttcttctgaatg

SEQ ID NO: 20993 - DNA, 26 bp, Homo sapiens
aggctccccgaccttcttctgaatgg

SEQ ID NO: 20994 - DNA, 26 bp, Homo sapiens
ggctccccgaccttcttctgaatggt

SEQ ID NO: 20995 - DNA, 26 bp, Homo sapiens
gctccccgaccttcttctgaatggtc

SEQ ID NO: 20996 - DNA, 26 bp, Homo sapiens
ctccccgaccttcttctgaatggtct

SEQ ID NO: 20997 - DNA, 26 bp, Homo sapiens
tccccgaccttcttctgaatggtctg

SEQ ID NO: 20998 - DNA, 26 bp, Homo sapiens
ccccgaccttcttctgaatggtctgg

SEQ ID NO: 20999 - DNA, 26 bp, Homo sapiens
cccgaccttcttctgaatggtctggc

SEQ ID NO: 21000 - DNA, 26 bp, Homo sapiens
ccgaccttcttctgaatggtctggcg

SEQ ID NO: 21001 - DNA, 26 bp, Homo sapiens
cgaccttcttctgaatggtctggcgc

SEQ ID NO: 21002 - DNA, 26 bp, Homo sapiens
gaccttcttctgaatggtctggcgca

SEQ ID NO: 21003 - DNA, 26 bp, Homo sapiens
accttcttctgaatggtctggcgcag

SEQ ID NO: 21004 - DNA, 26 bp, Homo sapiens
ccttcttctgaatggtctggcgcagg

SEQ ID NO: 21005 - DNA, 26 bp, Homo sapiens
cttcttctgaatggtctggcgcaggt

SEQ ID NO: 21006 - DNA, 26 bp, Homo sapiens
ttcttctgaatggtctggcgcaggtg

SEQ ID NO: 21007 - DNA, 26 bp, Homo sapiens
tcttctgaatggtctggcgcaggtgc

SEQ ID NO: 21008 - DNA, 26 bp, Homo sapiens
cttctgaatggtctggcgcaggtgcc

SEQ ID NO: 21009 - DNA, 26 bp, Homo sapiens
ttctgaatggtctggcgcaggtgcct

SEQ ID NO: 21010 - DNA, 26 bp, Homo sapiens
tctgaatggtctggcgcaggtgcctg

SEQ ID NO: 21011 - DNA, 26 bp, Homo sapiens
ctgaatggtctggcgcaggtgcctgg

SEQ ID NO: 21012 - DNA, 26 bp, Homo sapiens
tgaatggtctggcgcaggtgcctggg

SEQ ID NO: 21013 - DNA, 26 bp, Homo sapiens
gaatggtctggcgcaggtgcctgggc

SEQ ID NO: 21014 - DNA, 26 bp, Homo sapiens
aatggtctggcgcaggtgcctgggca

SEQ ID NO: 21015 - DNA, 26 bp, Homo sapiens
atggtctggcgcaggtgcctgggcag

SEQ ID NO: 21016 - DNA, 26 bp, Homo sapiens
tggtctggcgcaggtgcctgggcagc

SEQ ID NO: 21017 - DNA, 26 bp, Homo sapiens
ggtctggcgcaggtgcctgggcagct

SEQ ID NO: 21018 - DNA, 26 bp, Homo sapiens
gtctggcgcaggtgcctgggcagctg

SEQ ID NO: 21019 - DNA, 26 bp, Homo sapiens
tctggcgcaggtgcctgggcagctga

SEQ ID NO: 21020 - DNA, 26 bp, Homo sapiens
ctggcgcaggtgcctgggcagctgaa

SEQ ID NO: 21021 - DNA, 26 bp, Homo sapiens
tggcgcaggtgcctgggcagctgaag

SEQ ID NO: 21022 - DNA, 26 bp, Homo sapiens
ggcgcaggtgcctgggcagctgaagc

SEQ ID NO: 21023 - DNA, 26 bp, Homo sapiens
gcgcaggtgcctgggcagctgaagcc

SEQ ID NO: 21024 - DNA, 26 bp, Homo sapiens
cgcaggtgcctgggcagctgaagccg

SEQ ID NO: 21025 - DNA, 26 bp, Homo sapiens
gcaggtgcctgggcagctgaagccgt

SEQ ID NO: 21026 - DNA, 26 bp, Homo sapiens
caggtgcctgggcagctgaagccgtg

SEQ ID NO: 21027 - DNA, 26 bp, Homo sapiens
aggtgcctgggcagctgaagccgtgg

SEQ ID NO: 21028 - DNA, 26 bp, Homo sapiens
ggtgcctgggcagctgaagccgtggc

SEQ ID NO: 21029 - DNA, 26 bp, Homo sapiens
gtgcctgggcagctgaagccgtggcc

SEQ ID NO: 21030 - DNA, 26 bp, Homo sapiens
tgcctgggcagctgaagccgtggccg

SEQ ID NO: 21031 - DNA, 26 bp, Homo sapiens
gcctgggcagctgaagccgtggccgt

SEQ ID NO: 21032 - DNA, 26 bp, Homo sapiens
cctgggcagctgaagccgtggccgtt

SEQ ID NO: 21033 - DNA, 26 bp, Homo sapiens
ctgggcagctgaagccgtggccgttg

SEQ ID NO: 21034 - DNA, 26 bp, Homo sapiens
tgggcagctgaagccgtggccgttgc

SEQ ID NO: 21035 - DNA, 26 bp, Homo sapiens
gggcagctgaagccgtggccgttgca

SEQ ID NO: 21036 - DNA, 26 bp, Homo sapiens
ggcagctgaagccgtggccgttgcag

SEQ ID NO: 21037 - DNA, 26 bp, Homo sapiens
gcagctgaagccgtggccgttgcagg

SEQ ID NO: 21038 - DNA, 26 bp, Homo sapiens
cagctgaagccgtggccgttgcagga

SEQ ID NO: 21039 - DNA, 26 bp, Homo sapiens
agctgaagccgtggccgttgcaggat

SEQ ID NO: 21040 - DNA, 26 bp, Homo sapiens
gctgaagccgtggccgttgcaggatc

SEQ ID NO: 21041 - DNA, 26 bp, Homo sapiens
ctgaagccgtggccgttgcaggatct

SEQ ID NO: 21042 - DNA, 26 bp, Homo sapiens
tgaagccgtggccgttgcaggatctc

SEQ ID NO: 21043 - DNA, 26 bp, Homo sapiens
gaagccgtggccgttgcaggatctcc

SEQ ID NO: 21044 - DNA, 26 bp, Homo sapiens
aagccgtggccgttgcaggatctcct

SEQ ID NO: 21045 - DNA, 26 bp, Homo sapiens
agccgtggccgttgcaggatctcctg

SEQ ID NO: 21046 - DNA, 26 bp, Homo sapiens
gccgtggccgttgcaggatctcctgc

SEQ ID NO: 21047 - DNA, 26 bp, Homo sapiens
ccgtggccgttgcaggatctcctgca

SEQ ID NO: 21048 - DNA, 26 bp, Homo sapiens
cgtggccgttgcaggatctcctgcac

SEQ ID NO: 21049 - DNA, 26 bp, Homo sapiens
gtggccgttgcaggatctcctgcact

SEQ ID NO: 21050 - DNA, 26 bp, Homo sapiens
tggccgttgcaggatctcctgcactg

SEQ ID NO: 21051 - DNA, 26 bp, Homo sapiens
ggccgttgcaggatctcctgcactgt

SEQ ID NO: 21052 - DNA, 26 bp, Homo sapiens
gccgttgcaggatctcctgcactgtc

SEQ ID NO: 21053 - DNA, 26 bp, Homo sapiens
ccgttgcaggatctcctgcactgtca

SEQ ID NO: 21054 - DNA, 26 bp, Homo sapiens
cgttgcaggatctcctgcactgtcac

SEQ ID NO: 21055 - DNA, 26 bp, Homo sapiens
gttgcaggatctcctgcactgtcacc

SEQ ID NO: 21056 - DNA, 26 bp, Homo sapiens
ttgcaggatctcctgcactgtcaccg

SEQ ID NO: 21057 - DNA, 26 bp, Homo sapiens
tgcaggatctcctgcactgtcaccgg

SEQ ID NO: 21058 - DNA, 26 bp, Homo sapiens
gcaggatctcctgcactgtcaccggc

SEQ ID NO: 21059 - DNA, 26 bp, Homo sapiens
caggatctcctgcactgtcaccggct

SEQ ID NO: 21060 - DNA, 26 bp, Homo sapiens
aggatctcctgcactgtcaccggctc

SEQ ID NO: 21061 - DNA, 26 bp, Homo sapiens
ggatctcctgcactgtcaccggctcc

SEQ ID NO: 21062 - DNA, 26 bp, Homo sapiens
gatctcctgcactgtcaccggctccg

SEQ ID NO: 21063 - DNA, 26 bp, Homo sapiens
atctcctgcactgtcaccggctccgt

SEQ ID NO: 21064 - DNA, 26 bp, Homo sapiens
tctcctgcactgtcaccggctccgtg

SEQ ID NO: 21065 - DNA, 26 bp, Homo sapiens
ctcctgcactgtcaccggctccgtgg

SEQ ID NO: 21066 - DNA, 26 bp, Homo sapiens
tcctgcactgtcaccggctccgtggt

SEQ ID NO: 21067 - DNA, 26 bp, Homo sapiens
cctgcactgtcaccggctccgtggtg

SEQ ID NO: 21068 - DNA, 26 bp, Homo sapiens
ctgcactgtcaccggctccgtggtgg

SEQ ID NO: 21069 - DNA, 26 bp, Homo sapiens
tgcactgtcaccggctccgtggtggt

SEQ ID NO: 21070 - DNA, 26 bp, Homo sapiens
gcactgtcaccggctccgtggtggta

SEQ ID NO: 21071 - DNA, 26 bp, Homo sapiens
cactgtcaccggctccgtggtggtaa

SEQ ID NO: 21072 - DNA, 26 bp, Homo sapiens
actgtcaccggctccgtggtggtaac

SEQ ID NO: 21073 - DNA, 26 bp, Homo sapiens
ctgtcaccggctccgtggtggtaaca

SEQ ID NO: 21074 - DNA, 26 bp, Homo sapiens
tgtcaccggctccgtggtggtaacag

SEQ ID NO: 21075 - DNA, 26 bp, Homo sapiens
gtcaccggctccgtggtggtaacagg

SEQ ID NO: 21076 - DNA, 26 bp, Homo sapiens
tcaccggctccgtggtggtaacaggg

SEQ ID NO: 21077 - DNA, 26 bp, Homo sapiens
caccggctccgtggtggtaacagggg

SEQ ID NO: 21078 - DNA, 26 bp, Homo sapiens
accggctccgtggtggtaacaggggc

SEQ ID NO: 21079 - DNA, 26 bp, Homo sapiens
ccggctccgtggtggtaacaggggct

SEQ ID NO: 21080 - DNA, 26 bp, Homo sapiens
cggctccgtggtggtaacaggggctc

SEQ ID NO: 21081 - DNA, 26 bp, Homo sapiens
ggctccgtggtggtaacaggggctcc

SEQ ID NO: 21082 - DNA, 26 bp, Homo sapiens
gctccgtggtggtaacaggggctcca

SEQ ID NO: 21083 - DNA, 26 bp, Homo sapiens
ctccgtggtggtaacaggggctccag

SEQ ID NO: 21084 - DNA, 26 bp, Homo sapiens
tccgtggtggtaacaggggctccagg

SEQ ID NO: 21085 - DNA, 26 bp, Homo sapiens
ccgtggtggtaacaggggctccaggc

SEQ ID NO: 21086 - DNA, 26 bp, Homo sapiens
cgtggtggtaacaggggctccaggcc

SEQ ID NO: 21087 - DNA, 26 bp, Homo sapiens
gtggtggtaacaggggctccaggccc

SEQ ID NO: 21088 - DNA, 26 bp, Homo sapiens
tggtggtaacaggggctccaggccct

SEQ ID NO: 21089 - DNA, 26 bp, Homo sapiens
ggtggtaacaggggctccaggccctg

SEQ ID NO: 21090 - DNA, 26 bp, Homo sapiens
gtggtaacaggggctccaggccctgc

SEQ ID NO: 21091 - DNA, 26 bp, Homo sapiens
tggtaacaggggctccaggccctgcc

SEQ ID NO: 21092 - DNA, 26 bp, Homo sapiens
ggtaacaggggctccaggccctgcca

SEQ ID NO: 21093 - DNA, 26 bp, Homo sapiens
gtaacaggggctccaggccctgccat

SEQ ID NO: 21094 - DNA, 26 bp, Homo sapiens
taacaggggctccaggccctgccata

SEQ ID NO: 21095 - DNA, 26 bp, Homo sapiens
aacaggggctccaggccctgccatat

SEQ ID NO: 21096 - DNA, 26 bp, Homo sapiens
acaggggctccaggccctgccatatt

SEQ ID NO: 21097 - DNA, 26 bp, Homo sapiens
caggggctccaggccctgccatattg

SEQ ID NO: 21098 - DNA, 26 bp, Homo sapiens
aggggctccaggccctgccatattgt

SEQ ID NO: 21099 - DNA, 26 bp, Homo sapiens
ggggctccaggccctgccatattgtg

SEQ ID NO: 21100 - DNA, 26 bp, Homo sapiens
gggctccaggccctgccatattgtgt

SEQ ID NO: 21101 - DNA, 26 bp, Homo sapiens
ggctccaggccctgccatattgtgtg

SEQ ID NO: 21102 - DNA, 26 bp, Homo sapiens
gctccaggccctgccatattgtgtgc

SEQ ID NO: 21103 - DNA, 26 bp, Homo sapiens
ctccaggccctgccatattgtgtgcc

SEQ ID NO: 21104 - DNA, 26 bp, Homo sapiens
tccaggccctgccatattgtgtgccc

SEQ ID NO: 21105 - DNA, 26 bp, Homo sapiens
ccaggccctgccatattgtgtgcccg

SEQ ID NO: 21106 - DNA, 26 bp, Homo sapiens
caggccctgccatattgtgtgcccgc

SEQ ID NO: 21107 - DNA, 26 bp, Homo sapiens
aggccctgccatattgtgtgcccgca

SEQ ID NO: 21108 - DNA, 26 bp, Homo sapiens
ggccctgccatattgtgtgcccgcac

SEQ ID NO: 21109 - DNA, 26 bp, Homo sapiens
gccctgccatattgtgtgcccgcact

SEQ ID NO: 21110 - DNA, 26 bp, Homo sapiens
ccctgccatattgtgtgcccgcactc

SEQ ID NO: 21111 - DNA, 26 bp, Homo sapiens
cctgccatattgtgtgcccgcactcg

SEQ ID NO: 21112 - DNA, 26 bp, Homo sapiens
ctgccatattgtgtgcccgcactcgg

SEQ ID NO: 21113 - DNA, 26 bp, Homo sapiens
tgccatattgtgtgcccgcactcgga

SEQ ID NO: 21114 - DNA, 26 bp, Homo sapiens
gccatattgtgtgcccgcactcggaa

SEQ ID NO: 21115 - DNA, 26 bp, Homo sapiens
ccatattgtgtgcccgcactcggaaa

SEQ ID NO: 21116 - DNA, 26 bp, Homo sapiens
catattgtgtgcccgcactcggaaaa

SEQ ID NO: 21117 - DNA, 26 bp, Homo sapiens
atattgtgtgcccgcactcggaaaag

SEQ ID NO: 21118 - DNA, 26 bp, Homo sapiens
tattgtgtgcccgcactcggaaaagc

SEQ ID NO: 21119 - DNA, 26 bp, Homo sapiens
attgtgtgcccgcactcggaaaagca

SEQ ID NO: 21120 - DNA, 26 bp, Homo sapiens
ttgtgtgcccgcactcggaaaagcag

SEQ ID NO: 21121 - DNA, 26 bp, Homo sapiens
tgtgtgcccgcactcggaaaagcagc

SEQ ID NO: 21122 - DNA, 26 bp, Homo sapiens
gtgtgcccgcactcggaaaagcagcc

SEQ ID NO: 21123 - DNA, 26 bp, Homo sapiens
tgtgcccgcactcggaaaagcagccg

SEQ ID NO: 21124 - DNA, 26 bp, Homo sapiens
gtgcccgcactcggaaaagcagccgg

SEQ ID NO: 21125 - DNA, 26 bp, Homo sapiens
tgcccgcactcggaaaagcagccggg

SEQ ID NO: 21126 - DNA, 26 bp, Homo sapiens
gcccgcactcggaaaagcagccgggc

SEQ ID NO: 21127 - DNA, 26 bp, Homo sapiens
cccgcactcggaaaagcagccgggcc

SEQ ID NO: 21128 - DNA, 26 bp, Homo sapiens
ccgcactcggaaaagcagccgggccc

SEQ ID NO: 21129 - DNA, 26 bp, Homo sapiens
cgcactcggaaaagcagccgggcccc

SEQ ID NO: 21130 - DNA, 26 bp, Homo sapiens
gcactcggaaaagcagccgggccccc

SEQ ID NO: 21131 - DNA, 26 bp, Homo sapiens
cactcggaaaagcagccgggcccccg

SEQ ID NO: 21132 - DNA, 26 bp, Homo sapiens
actcggaaaagcagccgggcccccgt

SEQ ID NO: 21133 - DNA, 26 bp, Homo sapiens
ctcggaaaagcagccgggcccccgtg

SEQ ID NO: 21134 - DNA, 26 bp, Homo sapiens
tcggaaaagcagccgggcccccgtgg

SEQ ID NO: 21135 - DNA, 26 bp, Homo sapiens
cggaaaagcagccgggcccccgtggg

SEQ ID NO: 21136 - DNA, 26 bp, Homo sapiens
ggaaaagcagccgggcccccgtgggc

SEQ ID NO: 21137 - DNA, 26 bp, Homo sapiens
gaaaagcagccgggcccccgtgggca

SEQ ID NO: 21138 - DNA, 26 bp, Homo sapiens
aaaagcagccgggcccccgtgggcag

SEQ ID NO: 21139 - DNA, 26 bp, Homo sapiens
aaagcagccgggcccccgtgggcagg

SEQ ID NO: 21140 - DNA, 26 bp, Homo sapiens
aagcagccgggcccccgtgggcaggt

SEQ ID NO: 21141 - DNA, 26 bp, Homo sapiens
agcagccgggcccccgtgggcaggtc

SEQ ID NO: 21142 - DNA, 26 bp, Homo sapiens
gcagccgggcccccgtgggcaggtcc

SEQ ID NO: 21143 - DNA, 26 bp, Homo sapiens
cagccgggcccccgtgggcaggtcct

SEQ ID NO: 21144 - DNA, 26 bp, Homo sapiens
agccgggcccccgtgggcaggtcctt

SEQ ID NO: 21145 - DNA, 26 bp, Homo sapiens
gccgggcccccgtgggcaggtccttc

SEQ ID NO: 21146 - DNA, 26 bp, Homo sapiens
ccgggcccccgtgggcaggtccttca

SEQ ID NO: 21147 - DNA, 26 bp, Homo sapiens
cgggcccccgtgggcaggtccttcac

SEQ ID NO: 21148 - DNA, 26 bp, Homo sapiens
gggcccccgtgggcaggtccttcacc

SEQ ID NO: 21149 - DNA, 26 bp, Homo sapiens
ggcccccgtgggcaggtccttcacca

SEQ ID NO: 21150 - DNA, 26 bp, Homo sapiens
gcccccgtgggcaggtccttcaccag

SEQ ID NO: 21151 - DNA, 26 bp, Homo sapiens
cccccgtgggcaggtccttcaccagt

SEQ ID NO: 21152 - DNA, 26 bp, Homo sapiens
ccccgtgggcaggtccttcaccagta

SEQ ID NO: 21153 - DNA, 26 bp, Homo sapiens
cccgtgggcaggtccttcaccagtat

SEQ ID NO: 21154 - DNA, 26 bp, Homo sapiens
ccgtgggcaggtccttcaccagtatc

SEQ ID NO: 21155 - DNA, 26 bp, Homo sapiens
cgtgggcaggtccttcaccagtatcg

SEQ ID NO: 21156 - DNA, 26 bp, Homo sapiens
gtgggcaggtccttcaccagtatcga

SEQ ID NO: 21157 - DNA, 26 bp, Homo sapiens
tgggcaggtccttcaccagtatcgat

SEQ ID NO: 21158 - DNA, 26 bp, Homo sapiens
gggcaggtccttcaccagtatcgatg

SEQ ID NO: 21159 - DNA, 26 bp, Homo sapiens
ggcaggtccttcaccagtatcgatgt

SEQ ID NO: 21160 - DNA, 26 bp, Homo sapiens
gcaggtccttcaccagtatcgatgtg

SEQ ID NO: 21161 - DNA, 26 bp, Homo sapiens
caggtccttcaccagtatcgatgtgt

SEQ ID NO: 21162 - DNA, 26 bp, Homo sapiens
aggtccttcaccagtatcgatgtgtg

SEQ ID NO: 21163 - DNA, 26 bp, Homo sapiens
ggtccttcaccagtatcgatgtgtgc

SEQ ID NO: 21164 - DNA, 26 bp, Homo sapiens
gtccttcaccagtatcgatgtgtgct

SEQ ID NO: 21165 - DNA, 26 bp, Homo sapiens
tccttcaccagtatcgatgtgtgctc

SEQ ID NO: 21166 - DNA, 26 bp, Homo sapiens
ccttcaccagtatcgatgtgtgctct

SEQ ID NO: 21167 - DNA, 26 bp, Homo sapiens
cttcaccagtatcgatgtgtgctctg

SEQ ID NO: 21168 - DNA, 26 bp, Homo sapiens
ttcaccagtatcgatgtgtgctctgt

SEQ ID NO: 21169 - DNA, 26 bp, Homo sapiens
tcaccagtatcgatgtgtgctctgtc

SEQ ID NO: 21170 - DNA, 26 bp, Homo sapiens
caccagtatcgatgtgtgctctgtca

SEQ ID NO: 21171 - DNA, 26 bp, Homo sapiens
accagtatcgatgtgtgctctgtcag

SEQ ID NO: 21172 - DNA, 26 bp, Homo sapiens
ccagtatcgatgtgtgctctgtcagc

SEQ ID NO: 21173 - DNA, 26 bp, Homo sapiens
cagtatcgatgtgtgctctgtcagcc

SEQ ID NO: 21174 - DNA, 26 bp, Homo sapiens
agtatcgatgtgtgctctgtcagccc

SEQ ID NO: 21175 - DNA, 26 bp, Homo sapiens
gtatcgatgtgtgctctgtcagcccc

SEQ ID NO: 21176 - DNA, 26 bp, Homo sapiens
tatcgatgtgtgctctgtcagcccct

SEQ ID NO: 21177 - DNA, 26 bp, Homo sapiens
atcgatgtgtgctctgtcagcccctg

SEQ ID NO: 21178 - DNA, 26 bp, Homo sapiens
tcgatgtgtgctctgtcagcccctgc

SEQ ID NO: 21179 - DNA, 26 bp, Homo sapiens
cgatgtgtgctctgtcagcccctgca

SEQ ID NO: 21180 - DNA, 26 bp, Homo sapiens
gatgtgtgctctgtcagcccctgcag

SEQ ID NO: 21181 - DNA, 26 bp, Homo sapiens
atgtgtgctctgtcagcccctgcagg

SEQ ID NO: 21182 - DNA, 26 bp, Homo sapiens
tgtgtgctctgtcagcccctgcaggg

SEQ ID NO: 21183 - DNA, 26 bp, Homo sapiens
gtgtgctctgtcagcccctgcagggc

SEQ ID NO: 21184 - DNA, 26 bp, Homo sapiens
tgtgctctgtcagcccctgcagggca

SEQ ID NO: 21185 - DNA, 26 bp, Homo sapiens
gtgctctgtcagcccctgcagggcag

SEQ ID NO: 21186 - DNA, 26 bp, Homo sapiens
tgctctgtcagcccctgcagggcagc

SEQ ID NO: 21187 - DNA, 26 bp, Homo sapiens
gctctgtcagcccctgcagggcagcc

SEQ ID NO: 21188 - DNA, 26 bp, Homo sapiens
ctctgtcagcccctgcagggcagcca

SEQ ID NO: 21189 - DNA, 26 bp, Homo sapiens
tctgtcagcccctgcagggcagccac

SEQ ID NO: 21190 - DNA, 26 bp, Homo sapiens
ctgtcagcccctgcagggcagccacc

SEQ ID NO: 21191 - DNA, 26 bp, Homo sapiens
tgtcagcccctgcagggcagccaccc

SEQ ID NO: 21192 - DNA, 26 bp, Homo sapiens
gtcagcccctgcagggcagccaccca

SEQ ID NO: 21193 - DNA, 26 bp, Homo sapiens
tcagcccctgcagggcagccacccac

SEQ ID NO: 21194 - DNA, 26 bp, Homo sapiens
cagcccctgcagggcagccacccact

SEQ ID NO: 21195 - DNA, 26 bp, Homo sapiens
agcccctgcagggcagccacccactc

SEQ ID NO: 21196 - DNA, 26 bp, Homo sapiens
gcccctgcagggcagccacccactct

SEQ ID NO: 21197 - DNA, 26 bp, Homo sapiens
cccctgcagggcagccacccactctg

SEQ ID NO: 21198 - DNA, 26 bp, Homo sapiens
ccctgcagggcagccacccactctga

SEQ ID NO: 21199 - DNA, 26 bp, Homo sapiens
cctgcagggcagccacccactctgag

SEQ ID NO: 21200 - DNA, 26 bp, Homo sapiens
ctgcagggcagccacccactctgagc

SEQ ID NO: 21201 - DNA, 26 bp, Homo sapiens
tgcagggcagccacccactctgagca

SEQ ID NO: 21202 - DNA, 26 bp, Homo sapiens
gcagggcagccacccactctgagcag

SEQ ID NO: 21203 - DNA, 26 bp, Homo sapiens
cagggcagccacccactctgagcagc

SEQ ID NO: 21204 - DNA, 26 bp, Homo sapiens
agggcagccacccactctgagcagcc

SEQ ID NO: 21205 - DNA, 26 bp, Homo sapiens
gggcagccacccactctgagcagccc

SEQ ID NO: 21206 - DNA, 26 bp, Homo sapiens
ggcagccacccactctgagcagccct

SEQ ID NO: 21207 - DNA, 26 bp, Homo sapiens
gcagccacccactctgagcagccctc

SEQ ID NO: 21208 - DNA, 26 bp, Homo sapiens
cagccacccactctgagcagccctct

SEQ ID NO: 21209 - DNA, 26 bp, Homo sapiens
agccacccactctgagcagccctctg

SEQ ID NO: 21210 - DNA, 26 bp, Homo sapiens
gccacccactctgagcagccctctgg

SEQ ID NO: 21211 - DNA, 26 bp, Homo sapiens
ccacccactctgagcagccctctggg

SEQ ID NO: 21212 - DNA, 26 bp, Homo sapiens
cacccactctgagcagccctctgggc

SEQ ID NO: 21213 - DNA, 26 bp, Homo sapiens
acccactctgagcagccctctgggca

SEQ ID NO: 21214 - DNA, 26 bp, Homo sapiens
cccactctgagcagccctctgggcag

SEQ ID NO: 21215 - DNA, 26 bp, Homo sapiens
ccactctgagcagccctctgggcagt

SEQ ID NO: 21216 - DNA, 26 bp, Homo sapiens
cactctgagcagccctctgggcagta

SEQ ID NO: 21217 - DNA, 26 bp, Homo sapiens
actctgagcagccctctgggcagtac

SEQ ID NO: 21218 - DNA, 26 bp, Homo sapiens
ctctgagcagccctctgggcagtact

SEQ ID NO: 21219 - DNA, 26 bp, Homo sapiens
tctgagcagccctctgggcagtactc

SEQ ID NO: 21220 - DNA, 26 bp, Homo sapiens
ctgagcagccctctgggcagtactcc

SEQ ID NO: 21221 - DNA, 26 bp, Homo sapiens
tgagcagccctctgggcagtactcca

SEQ ID NO: 21222 - DNA, 26 bp, Homo sapiens
gagcagccctctgggcagtactccac

SEQ ID NO: 21223 - DNA, 26 bp, Homo sapiens
agcagccctctgggcagtactccacg

SEQ ID NO: 21224 - DNA, 26 bp, Homo sapiens
gcagccctctgggcagtactccacgc

SEQ ID NO: 21225 - DNA, 26 bp, Homo sapiens
cagccctctgggcagtactccacgct

SEQ ID NO: 21226 - DNA, 26 bp, Homo sapiens
agccctctgggcagtactccacgctg

SEQ ID NO: 21227 - DNA, 26 bp, Homo sapiens
gccctctgggcagtactccacgctgt

SEQ ID NO: 21228 - DNA, 26 bp, Homo sapiens
ccctctgggcagtactccacgctgta

SEQ ID NO: 21229 - DNA, 26 bp, Homo sapiens
cctctgggcagtactccacgctgtag

SEQ ID NO: 21230 - DNA, 26 bp, Homo sapiens
ctctgggcagtactccacgctgtagc

SEQ ID NO: 21231 - DNA, 26 bp, Homo sapiens
tctgggcagtactccacgctgtagcc

SEQ ID NO: 21232 - DNA, 26 bp, Homo sapiens
ctgggcagtactccacgctgtagcca

SEQ ID NO: 21233 - DNA, 26 bp, Homo sapiens
tgggcagtactccacgctgtagccat

SEQ ID NO: 21234 - DNA, 26 bp, Homo sapiens
gggcagtactccacgctgtagccatc

SEQ ID NO: 21235 - DNA, 26 bp, Homo sapiens
ggcagtactccacgctgtagccatcc

SEQ ID NO: 21236 - DNA, 26 bp, Homo sapiens
gcagtactccacgctgtagccatcca

SEQ ID NO: 21237 - DNA, 26 bp, Homo sapiens
cagtactccacgctgtagccatccag

SEQ ID NO: 21238 - DNA, 26 bp, Homo sapiens
agtactccacgctgtagccatccagg

SEQ ID NO: 21239 - DNA, 26 bp, Homo sapiens
gtactccacgctgtagccatccaggc

SEQ ID NO: 21240 - DNA, 26 bp, Homo sapiens
tactccacgctgtagccatccaggcc

SEQ ID NO: 21241 - DNA, 26 bp, Homo sapiens
actccacgctgtagccatccaggcct

SEQ ID NO: 21242 - DNA, 26 bp, Homo sapiens
ctccacgctgtagccatccaggcctc

SEQ ID NO: 21243 - DNA, 26 bp, Homo sapiens
tccacgctgtagccatccaggcctcc

SEQ ID NO: 21244 - DNA, 26 bp, Homo sapiens
ccacgctgtagccatccaggcctcct

SEQ ID NO: 21245 - DNA, 26 bp, Homo sapiens
cacgctgtagccatccaggcctcctg

SEQ ID NO: 21246 - DNA, 26 bp, Homo sapiens
acgctgtagccatccaggcctcctgc

SEQ ID NO: 21247 - DNA, 26 bp, Homo sapiens
cgctgtagccatccaggcctcctgct

SEQ ID NO: 21248 - DNA, 26 bp, Homo sapiens
gctgtagccatccaggcctcctgctc

SEQ ID NO: 21249 - DNA, 26 bp, Homo sapiens
ctgtagccatccaggcctcctgctcc

SEQ ID NO: 21250 - DNA, 26 bp, Homo sapiens
tgtagccatccaggcctcctgctccc

SEQ ID NO: 21251 - DNA, 26 bp, Homo sapiens
gtagccatccaggcctcctgctccca

SEQ ID NO: 21252 - DNA, 26 bp, Homo sapiens
tagccatccaggcctcctgctcccac

SEQ ID NO: 21253 - DNA, 26 bp, Homo sapiens
agccatccaggcctcctgctcccacg

SEQ ID NO: 21254 - DNA, 26 bp, Homo sapiens
gccatccaggcctcctgctcccacgc

SEQ ID NO: 21255 - DNA, 26 bp, Homo sapiens
ccatccaggcctcctgctcccacgcg

SEQ ID NO: 21256 - DNA, 26 bp, Homo sapiens
catccaggcctcctgctcccacgcgc

SEQ ID NO: 21257 - DNA, 26 bp, Homo sapiens
atccaggcctcctgctcccacgcgct

SEQ ID NO: 21258 - DNA, 26 bp, Homo sapiens
tccaggcctcctgctcccacgcgctc

SEQ ID NO: 21259 - DNA, 26 bp, Homo sapiens
ccaggcctcctgctcccacgcgctct

SEQ ID NO: 21260 - DNA, 26 bp, Homo sapiens
caggcctcctgctcccacgcgctctg

SEQ ID NO: 21261 - DNA, 26 bp, Homo sapiens
aggcctcctgctcccacgcgctctgg

SEQ ID NO: 21262 - DNA, 26 bp, Homo sapiens
ggcctcctgctcccacgcgctctggg

SEQ ID NO: 21263 - DNA, 26 bp, Homo sapiens
gcctcctgctcccacgcgctctgggg

SEQ ID NO: 21264 - DNA, 26 bp, Homo sapiens
cctcctgctcccacgcgctctggggg

SEQ ID NO: 21265 - DNA, 26 bp, Homo sapiens
ctcctgctcccacgcgctctgggggc

SEQ ID NO: 21266 - DNA, 26 bp, Homo sapiens
tcctgctcccacgcgctctgggggcc

SEQ ID NO: 21267 - DNA, 26 bp, Homo sapiens
cctgctcccacgcgctctgggggccg

SEQ ID NO: 21268 - DNA, 26 bp, Homo sapiens
ctgctcccacgcgctctgggggccgc

SEQ ID NO: 21269 - DNA, 26 bp, Homo sapiens
tgctcccacgcgctctgggggccgcc

SEQ ID NO: 21270 - DNA, 26 bp, Homo sapiens
gctcccacgcgctctgggggccgcca

SEQ ID NO: 21271 - DNA, 26 bp, Homo sapiens
ctcccacgcgctctgggggccgccac

SEQ ID NO: 21272 - DNA, 26 bp, Homo sapiens
tcccacgcgctctgggggccgccact

SEQ ID NO: 21273 - DNA, 26 bp, Homo sapiens
cccacgcgctctgggggccgccactt

SEQ ID NO: 21274 - DNA, 26 bp, Homo sapiens
ccacgcgctctgggggccgccacttg

SEQ ID NO: 21275 - DNA, 26 bp, Homo sapiens
cacgcgctctgggggccgccacttga

SEQ ID NO: 21276 - DNA, 26 bp, Homo sapiens
acgcgctctgggggccgccacttgag

SEQ ID NO: 21277 - DNA, 26 bp, Homo sapiens
cgcgctctgggggccgccacttgagg

SEQ ID NO: 21278 - DNA, 26 bp, Homo sapiens
gcgctctgggggccgccacttgaggg

SEQ ID NO: 21279 - DNA, 26 bp, Homo sapiens
cgctctgggggccgccacttgaggga

SEQ ID NO: 21280 - DNA, 26 bp, Homo sapiens
gctctgggggccgccacttgagggag

SEQ ID NO: 21281 - DNA, 26 bp, Homo sapiens
ctctgggggccgccacttgagggaga

SEQ ID NO: 21282 - DNA, 26 bp, Homo sapiens
tctgggggccgccacttgagggagac

SEQ ID NO: 21283 - DNA, 26 bp, Homo sapiens
ctgggggccgccacttgagggagacc

SEQ ID NO: 21284 - DNA, 26 bp, Homo sapiens
tgggggccgccacttgagggagaccg

SEQ ID NO: 21285 - DNA, 26 bp, Homo sapiens
gggggccgccacttgagggagaccgt

SEQ ID NO: 21286 - DNA, 26 bp, Homo sapiens
ggggccgccacttgagggagaccgtg

SEQ ID NO: 21287 - DNA, 26 bp, Homo sapiens
gggccgccacttgagggagaccgtgg

SEQ ID NO: 21288 - DNA, 26 bp, Homo sapiens
ggccgccacttgagggagaccgtggt

SEQ ID NO: 21289 - DNA, 26 bp, Homo sapiens
gccgccacttgagggagaccgtggtg

SEQ ID NO: 21290 - DNA, 26 bp, Homo sapiens
ccgccacttgagggagaccgtggtgt

SEQ ID NO: 21291 - DNA, 26 bp, Homo sapiens
cgccacttgagggagaccgtggtgtc

SEQ ID NO: 21292 - DNA, 26 bp, Homo sapiens
gccacttgagggagaccgtggtgtca

SEQ ID NO: 21293 - DNA, 26 bp, Homo sapiens
ccacttgagggagaccgtggtgtcag

SEQ ID NO: 21294 - DNA, 26 bp, Homo sapiens
cacttgagggagaccgtggtgtcaga

SEQ ID NO: 21295 - DNA, 26 bp, Homo sapiens
acttgagggagaccgtggtgtcagag

SEQ ID NO: 21296 - DNA, 26 bp, Homo sapiens
cttgagggagaccgtggtgtcagaga

SEQ ID NO: 21297 - DNA, 26 bp, Homo sapiens
ttgagggagaccgtggtgtcagagac

SEQ ID NO: 21298 - DNA, 26 bp, Homo sapiens
tgagggagaccgtggtgtcagagacg

SEQ ID NO: 21299 - DNA, 26 bp, Homo sapiens
gagggagaccgtggtgtcagagacgt

SEQ ID NO: 21300 - DNA, 26 bp, Homo sapiens
agggagaccgtggtgtcagagacgtc

SEQ ID NO: 21301 - DNA, 26 bp, Homo sapiens
gggagaccgtggtgtcagagacgtcc

SEQ ID NO: 21302 - DNA, 26 bp, Homo sapiens
ggagaccgtggtgtcagagacgtcct

SEQ ID NO: 21303 - DNA, 26 bp, Homo sapiens
gagaccgtggtgtcagagacgtcctc

SEQ ID NO: 21304 - DNA, 26 bp, Homo sapiens
agaccgtggtgtcagagacgtcctct

SEQ ID NO: 21305 - DNA, 26 bp, Homo sapiens
gaccgtggtgtcagagacgtcctcta

SEQ ID NO: 21306 - DNA, 26 bp, Homo sapiens
accgtggtgtcagagacgtcctctac

SEQ ID NO: 21307 - DNA, 26 bp, Homo sapiens
ccgtggtgtcagagacgtcctctact

SEQ ID NO: 21308 - DNA, 26 bp, Homo sapiens
cgtggtgtcagagacgtcctctactg

SEQ ID NO: 21309 - DNA, 26 bp, Homo sapiens
gtggtgtcagagacgtcctctactgc

SEQ ID NO: 21310 - DNA, 26 bp, Homo sapiens
tggtgtcagagacgtcctctactgcc

SEQ ID NO: 21311 - DNA, 26 bp, Homo sapiens
ggtgtcagagacgtcctctactgcca

SEQ ID NO: 21312 - DNA, 26 bp, Homo sapiens
gtgtcagagacgtcctctactgccag

SEQ ID NO: 21313 - DNA, 26 bp, Homo sapiens
tgtcagagacgtcctctactgccagg

SEQ ID NO: 21314 - DNA, 26 bp, Homo sapiens
gtcagagacgtcctctactgccaggt

SEQ ID NO: 21315 - DNA, 26 bp, Homo sapiens
tcagagacgtcctctactgccaggtg

SEQ ID NO: 21316 - DNA, 26 bp, Homo sapiens
cagagacgtcctctactgccaggtgg

SEQ ID NO: 21317 - DNA, 26 bp, Homo sapiens
agagacgtcctctactgccaggtggg

SEQ ID NO: 21318 - DNA, 26 bp, Homo sapiens
gagacgtcctctactgccaggtgggt

SEQ ID NO: 21319 - DNA, 26 bp, Homo sapiens
agacgtcctctactgccaggtgggtg

SEQ ID NO: 21320 - DNA, 26 bp, Homo sapiens
gacgtcctctactgccaggtgggtgg

SEQ ID NO: 21321 - DNA, 26 bp, Homo sapiens
acgtcctctactgccaggtgggtggg

SEQ ID NO: 21322 - DNA, 26 bp, Homo sapiens
cgtcctctactgccaggtgggtgggt

SEQ ID NO: 21323 - DNA, 26 bp, Homo sapiens
gtcctctactgccaggtgggtgggtt

SEQ ID NO: 21324 - DNA, 26 bp, Homo sapiens
tcctctactgccaggtgggtgggttc

SEQ ID NO: 21325 - DNA, 26 bp, Homo sapiens
cctctactgccaggtgggtgggttcg

SEQ ID NO: 21326 - DNA, 26 bp, Homo sapiens
ctctactgccaggtgggtgggttcgc

SEQ ID NO: 21327 - DNA, 26 bp, Homo sapiens
tctactgccaggtgggtgggttcgct

SEQ ID NO: 21328 - DNA, 26 bp, Homo sapiens
ctactgccaggtgggtgggttcgctg

SEQ ID NO: 21329 - DNA, 26 bp, Homo sapiens
tactgccaggtgggtgggttcgctgg

SEQ ID NO: 21330 - DNA, 26 bp, Homo sapiens
actgccaggtgggtgggttcgctggg

SEQ ID NO: 21331 - DNA, 26 bp, Homo sapiens
ctgccaggtgggtgggttcgctgggg

SEQ ID NO: 21332 - DNA, 26 bp, Homo sapiens
tgccaggtgggtgggttcgctggggg

SEQ ID NO: 21333 - DNA, 26 bp, Homo sapiens
gccaggtgggtgggttcgctgggggg

SEQ ID NO: 21334 - DNA, 26 bp, Homo sapiens
ccaggtgggtgggttcgctgggggga

SEQ ID NO: 21335 - DNA, 26 bp, Homo sapiens
caggtgggtgggttcgctggggggac

SEQ ID NO: 21336 - DNA, 26 bp, Homo sapiens
aggtgggtgggttcgctggggggacc

SEQ ID NO: 21337 - DNA, 26 bp, Homo sapiens
ggtgggtgggttcgctggggggaccg

SEQ ID NO: 21338 - DNA, 26 bp, Homo sapiens
gtgggtgggttcgctggggggaccga

SEQ ID NO: 21339 - DNA, 26 bp, Homo sapiens
tgggtgggttcgctggggggaccgat

SEQ ID NO: 21340 - DNA, 26 bp, Homo sapiens
gggtgggttcgctggggggaccgata

SEQ ID NO: 21341 - DNA, 26 bp, Homo sapiens
ggtgggttcgctggggggaccgatag

SEQ ID NO: 21342 - DNA, 26 bp, Homo sapiens
gtgggttcgctggggggaccgatagg

SEQ ID NO: 21343 - DNA, 26 bp, Homo sapiens
tgggttcgctggggggaccgataggc

SEQ ID NO: 21344 - DNA, 26 bp, Homo sapiens
gggttcgctggggggaccgataggca

SEQ ID NO: 21345 - DNA, 26 bp, Homo sapiens
ggttcgctggggggaccgataggcat

SEQ ID NO: 21346 - DNA, 26 bp, Homo sapiens
gttcgctggggggaccgataggcatg

SEQ ID NO: 21347 - DNA, 26 bp, Homo sapiens
ttcgctggggggaccgataggcatga

SEQ ID NO: 21348 - DNA, 26 bp, Homo sapiens
tcgctggggggaccgataggcatgaa

SEQ ID NO: 21349 - DNA, 26 bp, Homo sapiens
cgctggggggaccgataggcatgaag

SEQ ID NO: 21350 - DNA, 26 bp, Homo sapiens
gctggggggaccgataggcatgaagg

SEQ ID NO: 21351 - DNA, 26 bp, Homo sapiens
ctggggggaccgataggcatgaaggg

SEQ ID NO: 21352 - DNA, 26 bp, Homo sapiens
tggggggaccgataggcatgaagggc

SEQ ID NO: 21353 - DNA, 26 bp, Homo sapiens
ggggggaccgataggcatgaagggct

SEQ ID NO: 21354 - DNA, 26 bp, Homo sapiens
gggggaccgataggcatgaagggctg

SEQ ID NO: 21355 - DNA, 26 bp, Homo sapiens
ggggaccgataggcatgaagggctgg

SEQ ID NO: 21356 - DNA, 26 bp, Homo sapiens
gggaccgataggcatgaagggctggg

SEQ ID NO: 21357 - DNA, 26 bp, Homo sapiens
ggaccgataggcatgaagggctggga

SEQ ID NO: 21358 - DNA, 26 bp, Homo sapiens
gaccgataggcatgaagggctgggag

SEQ ID NO: 21359 - DNA, 26 bp, Homo sapiens
accgataggcatgaagggctgggagg

SEQ ID NO: 21360 - DNA, 26 bp, Homo sapiens
ccgataggcatgaagggctgggaggc

SEQ ID NO: 21361 - DNA, 26 bp, Homo sapiens
cgataggcatgaagggctgggaggca

SEQ ID NO: 21362 - DNA, 26 bp, Homo sapiens
gataggcatgaagggctgggaggcag

SEQ ID NO: 21363 - DNA, 26 bp, Homo sapiens
ataggcatgaagggctgggaggcagg

SEQ ID NO: 21364 - DNA, 26 bp, Homo sapiens
taggcatgaagggctgggaggcaggg

SEQ ID NO: 21365 - DNA, 26 bp, Homo sapiens
aggcatgaagggctgggaggcagggc

SEQ ID NO: 21366 - DNA, 26 bp, Homo sapiens
ggcatgaagggctgggaggcagggct

SEQ ID NO: 21367 - DNA, 26 bp, Homo sapiens
gcatgaagggctgggaggcagggctg

SEQ ID NO: 21368 - DNA, 26 bp, Homo sapiens
catgaagggctgggaggcagggctgg

SEQ ID NO: 21369 - DNA, 26 bp, Homo sapiens
atgaagggctgggaggcagggctggg

SEQ ID NO: 21370 - DNA, 26 bp, Homo sapiens
tgaagggctgggaggcagggctgggc

SEQ ID NO: 21371 - DNA, 26 bp, Homo sapiens
gaagggctgggaggcagggctgggcc

SEQ ID NO: 21372 - DNA, 26 bp, Homo sapiens
aagggctgggaggcagggctgggcct

SEQ ID NO: 21373 - DNA, 26 bp, Homo sapiens
agggctgggaggcagggctgggcctg

SEQ ID NO: 21374 - DNA, 26 bp, Homo sapiens
gggctgggaggcagggctgggcctgg

SEQ ID NO: 21375 - DNA, 26 bp, Homo sapiens
ggctgggaggcagggctgggcctgga

SEQ ID NO: 21376 - DNA, 26 bp, Homo sapiens
gctgggaggcagggctgggcctggac

SEQ ID NO: 21377 - DNA, 26 bp, Homo sapiens
ctgggaggcagggctgggcctggaca

SEQ ID NO: 21378 - DNA, 26 bp, Homo sapiens
tgggaggcagggctgggcctggacat

SEQ ID NO: 21379 - DNA, 26 bp, Homo sapiens
gggaggcagggctgggcctggacatg

SEQ ID NO: 21380 - DNA, 26 bp, Homo sapiens
ggaggcagggctgggcctggacatgc

SEQ ID NO: 21381 - DNA, 26 bp, Homo sapiens
gaggcagggctgggcctggacatgcc

SEQ ID NO: 21382 - DNA, 26 bp, Homo sapiens
aggcagggctgggcctggacatgccg

SEQ ID NO: 21383 - DNA, 26 bp, Homo sapiens
ggcagggctgggcctggacatgccga

SEQ ID NO: 21384 - DNA, 26 bp, Homo sapiens
gcagggctgggcctggacatgccgat

SEQ ID NO: 21385 - DNA, 26 bp, Homo sapiens
cagggctgggcctggacatgccgatg

SEQ ID NO: 21386 - DNA, 26 bp, Homo sapiens
agggctgggcctggacatgccgatgg

SEQ ID NO: 21387 - DNA, 26 bp, Homo sapiens
gggctgggcctggacatgccgatggc

SEQ ID NO: 21388 - DNA, 26 bp, Homo sapiens
ggctgggcctggacatgccgatggcg

SEQ ID NO: 21389 - DNA, 26 bp, Homo sapiens
gctgggcctggacatgccgatggcgt

SEQ ID NO: 21390 - DNA, 26 bp, Homo sapiens
ctgggcctggacatgccgatggcgtt

SEQ ID NO: 21391 - DNA, 26 bp, Homo sapiens
tgggcctggacatgccgatggcgttg

SEQ ID NO: 21392 - DNA, 26 bp, Homo sapiens
gggcctggacatgccgatggcgttga

SEQ ID NO: 21393 - DNA, 26 bp, Homo sapiens
ggcctggacatgccgatggcgttgac

SEQ ID NO: 21394 - DNA, 26 bp, Homo sapiens
gcctggacatgccgatggcgttgacc

SEQ ID NO: 21395 - DNA, 26 bp, Homo sapiens
cctggacatgccgatggcgttgaccg

SEQ ID NO: 21396 - DNA, 26 bp, Homo sapiens
ctggacatgccgatggcgttgaccgc

SEQ ID NO: 21397 - DNA, 26 bp, Homo sapiens
tggacatgccgatggcgttgaccgcg

SEQ ID NO: 21398 - DNA, 26 bp, Homo sapiens
ggacatgccgatggcgttgaccgcgt

SEQ ID NO: 21399 - DNA, 26 bp, Homo sapiens
gacatgccgatggcgttgaccgcgta

SEQ ID NO: 21400 - DNA, 26 bp, Homo sapiens
acatgccgatggcgttgaccgcgtag

SEQ ID NO: 21401 - DNA, 26 bp, Homo sapiens
catgccgatggcgttgaccgcgtaga

SEQ ID NO: 21402 - DNA, 26 bp, Homo sapiens
atgccgatggcgttgaccgcgtagac

SEQ ID NO: 21403 - DNA, 26 bp, Homo sapiens
tgccgatggcgttgaccgcgtagacg

SEQ ID NO: 21404 - DNA, 26 bp, Homo sapiens
gccgatggcgttgaccgcgtagacgc

SEQ ID NO: 21405 - DNA, 26 bp, Homo sapiens
ccgatggcgttgaccgcgtagacgcg

SEQ ID NO: 21406 - DNA, 26 bp, Homo sapiens
cgatggcgttgaccgcgtagacgcgc

SEQ ID NO: 21407 - DNA, 26 bp, Homo sapiens
gatggcgttgaccgcgtagacgcgca

SEQ ID NO: 21408 - DNA, 26 bp, Homo sapiens
atggcgttgaccgcgtagacgcgcat

SEQ ID NO: 21409 - DNA, 26 bp, Homo sapiens
tggcgttgaccgcgtagacgcgcatc

SEQ ID NO: 21410 - DNA, 26 bp, Homo sapiens
ggcgttgaccgcgtagacgcgcatct

SEQ ID NO: 21411 - DNA, 26 bp, Homo sapiens
gcgttgaccgcgtagacgcgcatctc

SEQ ID NO: 21412 - DNA, 26 bp, Homo sapiens
cgttgaccgcgtagacgcgcatctcg

SEQ ID NO: 21413 - DNA, 26 bp, Homo sapiens
gttgaccgcgtagacgcgcatctcgt

SEQ ID NO: 21414 - DNA, 26 bp, Homo sapiens
ttgaccgcgtagacgcgcatctcgta

SEQ ID NO: 21415 - DNA, 26 bp, Homo sapiens
tgaccgcgtagacgcgcatctcgtac

SEQ ID NO: 21416 - DNA, 26 bp, Homo sapiens
gaccgcgtagacgcgcatctcgtaca

SEQ ID NO: 21417 - DNA, 26 bp, Homo sapiens
accgcgtagacgcgcatctcgtacac

SEQ ID NO: 21418 - DNA, 26 bp, Homo sapiens
ccgcgtagacgcgcatctcgtacacc

SEQ ID NO: 21419 - DNA, 26 bp, Homo sapiens
cgcgtagacgcgcatctcgtacacca

SEQ ID NO: 21420 - DNA, 26 bp, Homo sapiens
gcgtagacgcgcatctcgtacaccac

SEQ ID NO: 21421 - DNA, 26 bp, Homo sapiens
cgtagacgcgcatctcgtacaccacg

SEQ ID NO: 21422 - DNA, 26 bp, Homo sapiens
gtagacgcgcatctcgtacaccacgc

SEQ ID NO: 21423 - DNA, 26 bp, Homo sapiens
tagacgcgcatctcgtacaccacgcc

SEQ ID NO: 21424 - DNA, 26 bp, Homo sapiens
agacgcgcatctcgtacaccacgccc

SEQ ID NO: 21425 - DNA, 26 bp, Homo sapiens
gacgcgcatctcgtacaccacgccct

SEQ ID NO: 21426 - DNA, 26 bp, Homo sapiens
acgcgcatctcgtacaccacgccctc

SEQ ID NO: 21427 - DNA, 26 bp, Homo sapiens
cgcgcatctcgtacaccacgccctcg

SEQ ID NO: 21428 - DNA, 26 bp, Homo sapiens
gcgcatctcgtacaccacgccctcga

SEQ ID NO: 21429 - DNA, 26 bp, Homo sapiens
cgcatctcgtacaccacgccctcgat

SEQ ID NO: 21430 - DNA, 26 bp, Homo sapiens
gcatctcgtacaccacgccctcgatc

SEQ ID NO: 21431 - DNA, 26 bp, Homo sapiens
catctcgtacaccacgccctcgatca

SEQ ID NO: 21432 - DNA, 26 bp, Homo sapiens
atctcgtacaccacgccctcgatcat

SEQ ID NO: 21433 - DNA, 26 bp, Homo sapiens
tctcgtacaccacgccctcgatcatg

SEQ ID NO: 21434 - DNA, 26 bp, Homo sapiens
ctcgtacaccacgccctcgatcatgc

SEQ ID NO: 21435 - DNA, 26 bp, Homo sapiens
tcgtacaccacgccctcgatcatgcg

SEQ ID NO: 21436 - DNA, 26 bp, Homo sapiens
cgtacaccacgccctcgatcatgcgc

SEQ ID NO: 21437 - DNA, 26 bp, Homo sapiens
gtacaccacgccctcgatcatgcgcc

SEQ ID NO: 21438 - DNA, 26 bp, Homo sapiens
tacaccacgccctcgatcatgcgccg

SEQ ID NO: 21439 - DNA, 26 bp, Homo sapiens
acaccacgccctcgatcatgcgccgc

SEQ ID NO: 21440 - DNA, 26 bp, Homo sapiens
caccacgccctcgatcatgcgccgcg

SEQ ID NO: 21441 - DNA, 26 bp, Homo sapiens
accacgccctcgatcatgcgccgcgc

SEQ ID NO: 21442 - DNA, 26 bp, Homo sapiens
ccacgccctcgatcatgcgccgcgct

SEQ ID NO: 21443 - DNA, 26 bp, Homo sapiens
cacgccctcgatcatgcgccgcgctt

SEQ ID NO: 21444 - DNA, 26 bp, Homo sapiens
acgccctcgatcatgcgccgcgcttc

SEQ ID NO: 21445 - DNA, 26 bp, Homo sapiens
cgccctcgatcatgcgccgcgcttca

SEQ ID NO: 21446 - DNA, 26 bp, Homo sapiens
gccctcgatcatgcgccgcgcttcat

SEQ ID NO: 21447 - DNA, 26 bp, Homo sapiens
ccctcgatcatgcgccgcgcttcatg

SEQ ID NO: 21448 - DNA, 26 bp, Homo sapiens
cctcgatcatgcgccgcgcttcatga

SEQ ID NO: 21449 - DNA, 26 bp, Homo sapiens
ctcgatcatgcgccgcgcttcatgac

SEQ ID NO: 21450 - DNA, 26 bp, Homo sapiens
tcgatcatgcgccgcgcttcatgact

SEQ ID NO: 21451 - DNA, 26 bp, Homo sapiens
cgatcatgcgccgcgcttcatgactc

SEQ ID NO: 21452 - DNA, 26 bp, Homo sapiens
gatcatgcgccgcgcttcatgactca

SEQ ID NO: 21453 - DNA, 26 bp, Homo sapiens
atcatgcgccgcgcttcatgactcag

SEQ ID NO: 21454 - DNA, 26 bp, Homo sapiens
tcatgcgccgcgcttcatgactcagc

SEQ ID NO: 21455 - DNA, 26 bp, Homo sapiens
catgcgccgcgcttcatgactcagct

SEQ ID NO: 21456 - DNA, 26 bp, Homo sapiens
atgcgccgcgcttcatgactcagctc

SEQ ID NO: 21457 - DNA, 26 bp, Homo sapiens
tgcgccgcgcttcatgactcagctcc

SEQ ID NO: 21458 - DNA, 26 bp, Homo sapiens
gcgccgcgcttcatgactcagctcct

SEQ ID NO: 21459 - DNA, 26 bp, Homo sapiens
cgccgcgcttcatgactcagctcctg

SEQ ID NO: 21460 - DNA, 26 bp, Homo sapiens
gccgcgcttcatgactcagctcctga

SEQ ID NO: 21461 - DNA, 26 bp, Homo sapiens
ccgcgcttcatgactcagctcctgaa

SEQ ID NO: 21462 - DNA, 26 bp, Homo sapiens
cgcgcttcatgactcagctcctgaat

SEQ ID NO: 21463 - DNA, 26 bp, Homo sapiens
gcgcttcatgactcagctcctgaatc

SEQ ID NO: 21464 - DNA, 26 bp, Homo sapiens
cgcttcatgactcagctcctgaatca

SEQ ID NO: 21465 - DNA, 26 bp, Homo sapiens
gcttcatgactcagctcctgaatcag

SEQ ID NO: 21466 - DNA, 26 bp, Homo sapiens
cttcatgactcagctcctgaatcagg

SEQ ID NO: 21467 - DNA, 26 bp, Homo sapiens
ttcatgactcagctcctgaatcaggt

SEQ ID NO: 21468 - DNA, 26 bp, Homo sapiens
tcatgactcagctcctgaatcaggtc

SEQ ID NO: 21469 - DNA, 26 bp, Homo sapiens
catgactcagctcctgaatcaggtcg

SEQ ID NO: 21470 - DNA, 26 bp, Homo sapiens
atgactcagctcctgaatcaggtcga

SEQ ID NO: 21471 - DNA, 26 bp, Homo sapiens
tgactcagctcctgaatcaggtcgaa

SEQ ID NO: 21472 - DNA, 26 bp, Homo sapiens
gactcagctcctgaatcaggtcgaag

SEQ ID NO: 21473 - DNA, 26 bp, Homo sapiens
actcagctcctgaatcaggtcgaagt

SEQ ID NO: 21474 - DNA, 26 bp, Homo sapiens
ctcagctcctgaatcaggtcgaagtt

SEQ ID NO: 21475 - DNA, 26 bp, Homo sapiens
tcagctcctgaatcaggtcgaagttc

SEQ ID NO: 21476 - DNA, 26 bp, Homo sapiens
cagctcctgaatcaggtcgaagttca

SEQ ID NO: 21477 - DNA, 26 bp, Homo sapiens
agctcctgaatcaggtcgaagttcag

SEQ ID NO: 21478 - DNA, 26 bp, Homo sapiens
gctcctgaatcaggtcgaagttcagc

SEQ ID NO: 21479 - DNA, 26 bp, Homo sapiens
ctcctgaatcaggtcgaagttcagcc

SEQ ID NO: 21480 - DNA, 26 bp, Homo sapiens
tcctgaatcaggtcgaagttcagccg

SEQ ID NO: 21481 - DNA, 26 bp, Homo sapiens
cctgaatcaggtcgaagttcagccgc

SEQ ID NO: 21482 - DNA, 26 bp, Homo sapiens
ctgaatcaggtcgaagttcagccgca

SEQ ID NO: 21483 - DNA, 26 bp, Homo sapiens
tgaatcaggtcgaagttcagccgcat

SEQ ID NO: 21484 - DNA, 26 bp, Homo sapiens
gaatcaggtcgaagttcagccgcatc

SEQ ID NO: 21485 - DNA, 26 bp, Homo sapiens
aatcaggtcgaagttcagccgcatcc

SEQ ID NO: 21486 - DNA, 26 bp, Homo sapiens
atcaggtcgaagttcagccgcatcca

SEQ ID NO: 21487 - DNA, 26 bp, Homo sapiens
tcaggtcgaagttcagccgcatccac

SEQ ID NO: 21488 - DNA, 26 bp, Homo sapiens
caggtcgaagttcagccgcatccacc

SEQ ID NO: 21489 - DNA, 26 bp, Homo sapiens
aggtcgaagttcagccgcatccaccg

SEQ ID NO: 21490 - DNA, 26 bp, Homo sapiens
ggtcgaagttcagccgcatccaccgg

SEQ ID NO: 21491 - DNA, 26 bp, Homo sapiens
gtcgaagttcagccgcatccaccggt

SEQ ID NO: 21492 - DNA, 26 bp, Homo sapiens
tcgaagttcagccgcatccaccggta

SEQ ID NO: 21493 - DNA, 26 bp, Homo sapiens
cgaagttcagccgcatccaccggtag

SEQ ID NO: 21494 - DNA, 26 bp, Homo sapiens
gaagttcagccgcatccaccggtagc

SEQ ID NO: 21495 - DNA, 26 bp, Homo sapiens
aagttcagccgcatccaccggtagct

SEQ ID NO: 21496 - DNA, 26 bp, Homo sapiens
agttcagccgcatccaccggtagctc

SEQ ID NO: 21497 - DNA, 26 bp, Homo sapiens
gttcagccgcatccaccggtagctct

SEQ ID NO: 21498 - DNA, 26 bp, Homo sapiens
ttcagccgcatccaccggtagctctt

SEQ ID NO: 21499 - DNA, 26 bp, Homo sapiens
tcagccgcatccaccggtagctcttc

SEQ ID NO: 21500 - DNA, 26 bp, Homo sapiens
cagccgcatccaccggtagctcttct

SEQ ID NO: 21501 - DNA, 26 bp, Homo sapiens
agccgcatccaccggtagctcttctt

SEQ ID NO: 21502 - DNA, 26 bp, Homo sapiens
gccgcatccaccggtagctcttcttc

SEQ ID NO: 21503 - DNA, 26 bp, Homo sapiens
ccgcatccaccggtagctcttcttct

SEQ ID NO: 21504 - DNA, 26 bp, Homo sapiens
cgcatccaccggtagctcttcttctt

SEQ ID NO: 21505 - DNA, 26 bp, Homo sapiens
gcatccaccggtagctcttcttcttc

SEQ ID NO: 21506 - DNA, 26 bp, Homo sapiens
catccaccggtagctcttcttcttct

SEQ ID NO: 21507 - DNA, 26 bp, Homo sapiens
atccaccggtagctcttcttcttctt

SEQ ID NO: 21508 - DNA, 26 bp, Homo sapiens
tccaccggtagctcttcttcttcttg

SEQ ID NO: 21509 - DNA, 26 bp, Homo sapiens
ccaccggtagctcttcttcttcttgc

SEQ ID NO: 21510 - DNA, 26 bp, Homo sapiens
caccggtagctcttcttcttcttgcg

SEQ ID NO: 21511 - DNA, 26 bp, Homo sapiens
accggtagctcttcttcttcttgcgc

SEQ ID NO: 21512 - DNA, 26 bp, Homo sapiens
ccggtagctcttcttcttcttgcgct

SEQ ID NO: 21513 - DNA, 26 bp, Homo sapiens
cggtagctcttcttcttcttgcgctc

SEQ ID NO: 21514 - DNA, 26 bp, Homo sapiens
ggtagctcttcttcttcttgcgctcc

SEQ ID NO: 21515 - DNA, 26 bp, Homo sapiens
gtagctcttcttcttcttgcgctcca

SEQ ID NO: 21516 - DNA, 26 bp, Homo sapiens
tagctcttcttcttcttgcgctccag

SEQ ID NO: 21517 - DNA, 26 bp, Homo sapiens
agctcttcttcttcttgcgctccagg

SEQ ID NO: 21518 - DNA, 26 bp, Homo sapiens
gctcttcttcttcttgcgctccagga

SEQ ID NO: 21519 - DNA, 26 bp, Homo sapiens
ctcttcttcttcttgcgctccaggat

SEQ ID NO: 21520 - DNA, 26 bp, Homo sapiens
tcttcttcttcttgcgctccaggatg

SEQ ID NO: 21521 - DNA, 26 bp, Homo sapiens
cttcttcttcttgcgctccaggatgt

SEQ ID NO: 21522 - DNA, 26 bp, Homo sapiens
ttcttcttcttgcgctccaggatgta

SEQ ID NO: 21523 - DNA, 26 bp, Homo sapiens
tcttcttcttgcgctccaggatgtag

SEQ ID NO: 21524 - DNA, 26 bp, Homo sapiens
cttcttcttgcgctccaggatgtagc

SEQ ID NO: 21525 - DNA, 26 bp, Homo sapiens
ttcttcttgcgctccaggatgtagcc

SEQ ID NO: 21526 - DNA, 26 bp, Homo sapiens
tcttcttgcgctccaggatgtagccc

SEQ ID NO: 21527 - DNA, 26 bp, Homo sapiens
cttcttgcgctccaggatgtagccca

SEQ ID NO: 21528 - DNA, 26 bp, Homo sapiens
ttcttgcgctccaggatgtagcccag

SEQ ID NO: 21529 - DNA, 26 bp, Homo sapiens
tcttgcgctccaggatgtagcccagg

SEQ ID NO: 21530 - DNA, 26 bp, Homo sapiens
cttgcgctccaggatgtagcccagga

SEQ ID NO: 21531 - DNA, 26 bp, Homo sapiens
ttgcgctccaggatgtagcccaggat

SEQ ID NO: 21532 - DNA, 26 bp, Homo sapiens
tgcgctccaggatgtagcccaggatg

SEQ ID NO: 21533 - DNA, 26 bp, Homo sapiens
gcgctccaggatgtagcccaggatgg

SEQ ID NO: 21534 - DNA, 26 bp, Homo sapiens
cgctccaggatgtagcccaggatggg

SEQ ID NO: 21535 - DNA, 26 bp, Homo sapiens
gctccaggatgtagcccaggatgggc

SEQ ID NO: 21536 - DNA, 26 bp, Homo sapiens
ctccaggatgtagcccaggatgggct

SEQ ID NO: 21537 - DNA, 26 bp, Homo sapiens
tccaggatgtagcccaggatgggctg

SEQ ID NO: 21538 - DNA, 26 bp, Homo sapiens
ccaggatgtagcccaggatgggctgc

SEQ ID NO: 21539 - DNA, 26 bp, Homo sapiens
caggatgtagcccaggatgggctgcc

SEQ ID NO: 21540 - DNA, 26 bp, Homo sapiens
aggatgtagcccaggatgggctgccc

SEQ ID NO: 21541 - DNA, 26 bp, Homo sapiens
ggatgtagcccaggatgggctgcccg

SEQ ID NO: 21542 - DNA, 26 bp, Homo sapiens
gatgtagcccaggatgggctgcccgc

SEQ ID NO: 21543 - DNA, 26 bp, Homo sapiens
atgtagcccaggatgggctgcccgcc

SEQ ID NO: 21544 - DNA, 26 bp, Homo sapiens
tgtagcccaggatgggctgcccgcca

SEQ ID NO: 21545 - DNA, 26 bp, Homo sapiens
gtagcccaggatgggctgcccgccat

SEQ ID NO: 21546 - DNA, 26 bp, Homo sapiens
tagcccaggatgggctgcccgccatc

SEQ ID NO: 21547 - DNA, 26 bp, Homo sapiens
agcccaggatgggctgcccgccatcg

SEQ ID NO: 21548 - DNA, 26 bp, Homo sapiens
gcccaggatgggctgcccgccatcgt

SEQ ID NO: 21549 - DNA, 26 bp, Homo sapiens
cccaggatgggctgcccgccatcgta

SEQ ID NO: 21550 - DNA, 26 bp, Homo sapiens
ccaggatgggctgcccgccatcgtag

SEQ ID NO: 21551 - DNA, 26 bp, Homo sapiens
caggatgggctgcccgccatcgtagg

SEQ ID NO: 21552 - DNA, 26 bp, Homo sapiens
aggatgggctgcccgccatcgtaggc

SEQ ID NO: 21553 - DNA, 26 bp, Homo sapiens
ggatgggctgcccgccatcgtaggca

SEQ ID NO: 21554 - DNA, 26 bp, Homo sapiens
gatgggctgcccgccatcgtaggcag

SEQ ID NO: 21555 - DNA, 26 bp, Homo sapiens
atgggctgcccgccatcgtaggcagg

SEQ ID NO: 21556 - DNA, 26 bp, Homo sapiens
tgggctgcccgccatcgtaggcaggc

SEQ ID NO: 21557 - DNA, 26 bp, Homo sapiens
gggctgcccgccatcgtaggcaggcg

SEQ ID NO: 21558 - DNA, 26 bp, Homo sapiens
ggctgcccgccatcgtaggcaggcgg

SEQ ID NO: 21559 - DNA, 26 bp, Homo sapiens
gctgcccgccatcgtaggcaggcggc

SEQ ID NO: 21560 - DNA, 26 bp, Homo sapiens
ctgcccgccatcgtaggcaggcggct

SEQ ID NO: 21561 - DNA, 26 bp, Homo sapiens
tgcccgccatcgtaggcaggcggctc

SEQ ID NO: 21562 - DNA, 26 bp, Homo sapiens
gcccgccatcgtaggcaggcggctcc

SEQ ID NO: 21563 - DNA, 26 bp, Homo sapiens
cccgccatcgtaggcaggcggctccc

SEQ ID NO: 21564 - DNA, 26 bp, Homo sapiens
ccgccatcgtaggcaggcggctccca

SEQ ID NO: 21565 - DNA, 26 bp, Homo sapiens
cgccatcgtaggcaggcggctcccac

SEQ ID NO: 21566 - DNA, 26 bp, Homo sapiens
gccatcgtaggcaggcggctcccact

SEQ ID NO: 21567 - DNA, 26 bp, Homo sapiens
ccatcgtaggcaggcggctcccactg

SEQ ID NO: 21568 - DNA, 26 bp, Homo sapiens
catcgtaggcaggcggctcccactgt

SEQ ID NO: 21569 - DNA, 26 bp, Homo sapiens
atcgtaggcaggcggctcccactgta

SEQ ID NO: 21570 - DNA, 26 bp, Homo sapiens
tcgtaggcaggcggctcccactgtac

SEQ ID NO: 21571 - DNA, 26 bp, Homo sapiens
cgtaggcaggcggctcccactgtact

SEQ ID NO: 21572 - DNA, 26 bp, Homo sapiens
gtaggcaggcggctcccactgtactg

SEQ ID NO: 21573 - DNA, 26 bp, Homo sapiens
taggcaggcggctcccactgtactgt

SEQ ID NO: 21574 - DNA, 26 bp, Homo sapiens
aggcaggcggctcccactgtactgtg

SEQ ID NO: 21575 - DNA, 26 bp, Homo sapiens
ggcaggcggctcccactgtactgtgc

SEQ ID NO: 21576 - DNA, 26 bp, Homo sapiens
gcaggcggctcccactgtactgtgca

SEQ ID NO: 21577 - DNA, 26 bp, Homo sapiens
caggcggctcccactgtactgtgcag

SEQ ID NO: 21578 - DNA, 26 bp, Homo sapiens
aggcggctcccactgtactgtgcagg

SEQ ID NO: 21579 - DNA, 26 bp, Homo sapiens
ggcggctcccactgtactgtgcagga

SEQ ID NO: 21580 - DNA, 26 bp, Homo sapiens
gcggctcccactgtactgtgcaggag

SEQ ID NO: 21581 - DNA, 26 bp, Homo sapiens
cggctcccactgtactgtgcaggagt

SEQ ID NO: 21582 - DNA, 26 bp, Homo sapiens
ggctcccactgtactgtgcaggagtc

SEQ ID NO: 21583 - DNA, 26 bp, Homo sapiens
gctcccactgtactgtgcaggagtcc

SEQ ID NO: 21584 - DNA, 26 bp, Homo sapiens
ctcccactgtactgtgcaggagtcct

SEQ ID NO: 21585 - DNA, 26 bp, Homo sapiens
tcccactgtactgtgcaggagtcctc

SEQ ID NO: 21586 - DNA, 26 bp, Homo sapiens
cccactgtactgtgcaggagtcctct

SEQ ID NO: 21587 - DNA, 26 bp, Homo sapiens
ccactgtactgtgcaggagtcctctc

SEQ ID NO: 21588 - DNA, 26 bp, Homo sapiens
cactgtactgtgcaggagtcctctcc

SEQ ID NO: 21589 - DNA, 26 bp, Homo sapiens
actgtactgtgcaggagtcctctccc

SEQ ID NO: 21590 - DNA, 26 bp, Homo sapiens
ctgtactgtgcaggagtcctctccca

SEQ ID NO: 21591 - DNA, 26 bp, Homo sapiens
tgtactgtgcaggagtcctctcccac

SEQ ID NO: 21592 - DNA, 26 bp, Homo sapiens
gtactgtgcaggagtcctctcccacg

SEQ ID NO: 21593 - DNA, 26 bp, Homo sapiens
tactgtgcaggagtcctctcccacgt

SEQ ID NO: 21594 - DNA, 26 bp, Homo sapiens
actgtgcaggagtcctctcccacgtt

SEQ ID NO: 21595 - DNA, 26 bp, Homo sapiens
ctgtgcaggagtcctctcccacgttg

SEQ ID NO: 21596 - DNA, 26 bp, Homo sapiens
tgtgcaggagtcctctcccacgttgc

SEQ ID NO: 21597 - DNA, 26 bp, Homo sapiens
gtgcaggagtcctctcccacgttgct

SEQ ID NO: 21598 - DNA, 26 bp, Homo sapiens
tgcaggagtcctctcccacgttgctg

SEQ ID NO: 21599 - DNA, 26 bp, Homo sapiens
gcaggagtcctctcccacgttgctga

SEQ ID NO: 21600 - DNA, 26 bp, Homo sapiens
caggagtcctctcccacgttgctgat

SEQ ID NO: 21601 - DNA, 26 bp, Homo sapiens
aggagtcctctcccacgttgctgatc

SEQ ID NO: 21602 - DNA, 26 bp, Homo sapiens
ggagtcctctcccacgttgctgatct

SEQ ID NO: 21603 - DNA, 26 bp, Homo sapiens
gagtcctctcccacgttgctgatctt

SEQ ID NO: 21604 - DNA, 26 bp, Homo sapiens
agtcctctcccacgttgctgatcttg

SEQ ID NO: 21605 - DNA, 26 bp, Homo sapiens
gtcctctcccacgttgctgatcttgg

SEQ ID NO: 21606 - DNA, 26 bp, Homo sapiens
tcctctcccacgttgctgatcttggg

SEQ ID NO: 21607 - DNA, 26 bp, Homo sapiens
cctctcccacgttgctgatcttgggg

SEQ ID NO: 21608 - DNA, 26 bp, Homo sapiens
ctctcccacgttgctgatcttggggg

SEQ ID NO: 21609 - DNA, 26 bp, Homo sapiens
tctcccacgttgctgatcttgggggc

SEQ ID NO: 21610 - DNA, 26 bp, Homo sapiens
ctcccacgttgctgatcttgggggcc

SEQ ID NO: 21611 - DNA, 26 bp, Homo sapiens
tcccacgttgctgatcttgggggccg

SEQ ID NO: 21612 - DNA, 26 bp, Homo sapiens
cccacgttgctgatcttgggggccgc

SEQ ID NO: 21613 - DNA, 26 bp, Homo sapiens
ccacgttgctgatcttgggggccgca

SEQ ID NO: 21614 - DNA, 26 bp, Homo sapiens
cacgttgctgatcttgggggccgcag

SEQ ID NO: 21615 - DNA, 26 bp, Homo sapiens
acgttgctgatcttgggggccgcagg

SEQ ID NO: 21616 - DNA, 26 bp, Homo sapiens
cgttgctgatcttgggggccgcaggt

SEQ ID NO: 21617 - DNA, 26 bp, Homo sapiens
gttgctgatcttgggggccgcaggtg

SEQ ID NO: 21618 - DNA, 26 bp, Homo sapiens
ttgctgatcttgggggccgcaggtgc

SEQ ID NO: 21619 - DNA, 26 bp, Homo sapiens
tgctgatcttgggggccgcaggtgcg

SEQ ID NO: 21620 - DNA, 26 bp, Homo sapiens
gctgatcttgggggccgcaggtgcgt

SEQ ID NO: 21621 - DNA, 26 bp, Homo sapiens
ctgatcttgggggccgcaggtgcgtc

SEQ ID NO: 21622 - DNA, 26 bp, Homo sapiens
tgatcttgggggccgcaggtgcgtct

SEQ ID NO: 21623 - DNA, 26 bp, Homo sapiens
gatcttgggggccgcaggtgcgtctg

SEQ ID NO: 21624 - DNA, 26 bp, Homo sapiens
atcttgggggccgcaggtgcgtctgg

SEQ ID NO: 21625 - DNA, 26 bp, Homo sapiens
tcttgggggccgcaggtgcgtctggc

SEQ ID NO: 21626 - DNA, 26 bp, Homo sapiens
cttgggggccgcaggtgcgtctggca

SEQ ID NO: 21627 - DNA, 26 bp, Homo sapiens
ttgggggccgcaggtgcgtctggcac

SEQ ID NO: 21628 - DNA, 26 bp, Homo sapiens
tgggggccgcaggtgcgtctggcacg

SEQ ID NO: 21629 - DNA, 26 bp, Homo sapiens
gggggccgcaggtgcgtctggcacgt

SEQ ID NO: 21630 - DNA, 26 bp, Homo sapiens
ggggccgcaggtgcgtctggcacgtc

SEQ ID NO: 21631 - DNA, 26 bp, Homo sapiens
gggccgcaggtgcgtctggcacgtcg

SEQ ID NO: 21632 - DNA, 26 bp, Homo sapiens
ggccgcaggtgcgtctggcacgtcga

SEQ ID NO: 21633 - DNA, 26 bp, Homo sapiens
gccgcaggtgcgtctggcacgtcgat

SEQ ID NO: 21634 - DNA, 26 bp, Homo sapiens
ccgcaggtgcgtctggcacgtcgatg

SEQ ID NO: 21635 - DNA, 26 bp, Homo sapiens
cgcaggtgcgtctggcacgtcgatga

SEQ ID NO: 21636 - DNA, 26 bp, Homo sapiens
gcaggtgcgtctggcacgtcgatgac

SEQ ID NO: 21637 - DNA, 26 bp, Homo sapiens
caggtgcgtctggcacgtcgatgacc

SEQ ID NO: 21638 - DNA, 26 bp, Homo sapiens
aggtgcgtctggcacgtcgatgacct

SEQ ID NO: 21639 - DNA, 26 bp, Homo sapiens
ggtgcgtctggcacgtcgatgacctt

SEQ ID NO: 21640 - DNA, 26 bp, Homo sapiens
gtgcgtctggcacgtcgatgaccttg

SEQ ID NO: 21641 - DNA, 26 bp, Homo sapiens
tgcgtctggcacgtcgatgaccttga

SEQ ID NO: 21642 - DNA, 26 bp, Homo sapiens
gcgtctggcacgtcgatgaccttgac

SEQ ID NO: 21643 - DNA, 26 bp, Homo sapiens
cgtctggcacgtcgatgaccttgact

SEQ ID NO: 21644 - DNA, 26 bp, Homo sapiens
gtctggcacgtcgatgaccttgactg

SEQ ID NO: 21645 - DNA, 26 bp, Homo sapiens
tctggcacgtcgatgaccttgactgt

SEQ ID NO: 21646 - DNA, 26 bp, Homo sapiens
ctggcacgtcgatgaccttgactgtg

SEQ ID NO: 21647 - DNA, 26 bp, Homo sapiens
tggcacgtcgatgaccttgactgtga

SEQ ID NO: 21648 - DNA, 26 bp, Homo sapiens
ggcacgtcgatgaccttgactgtgag

SEQ ID NO: 21649 - DNA, 26 bp, Homo sapiens
gcacgtcgatgaccttgactgtgagg

SEQ ID NO: 21650 - DNA, 26 bp, Homo sapiens
cacgtcgatgaccttgactgtgaggt

SEQ ID NO: 21651 - DNA, 26 bp, Homo sapiens
acgtcgatgaccttgactgtgaggtt

SEQ ID NO: 21652 - DNA, 26 bp, Homo sapiens
cgtcgatgaccttgactgtgaggttg

SEQ ID NO: 21653 - DNA, 26 bp, Homo sapiens
gtcgatgaccttgactgtgaggttga

SEQ ID NO: 21654 - DNA, 26 bp, Homo sapiens
tcgatgaccttgactgtgaggttgac

SEQ ID NO: 21655 - DNA, 26 bp, Homo sapiens
cgatgaccttgactgtgaggttgacc

SEQ ID NO: 21656 - DNA, 26 bp, Homo sapiens
gatgaccttgactgtgaggttgacct

SEQ ID NO: 21657 - DNA, 26 bp, Homo sapiens
atgaccttgactgtgaggttgacctg

SEQ ID NO: 21658 - DNA, 26 bp, Homo sapiens
tgaccttgactgtgaggttgacctgg

SEQ ID NO: 21659 - DNA, 26 bp, Homo sapiens
gaccttgactgtgaggttgacctggt

SEQ ID NO: 21660 - DNA, 26 bp, Homo sapiens
accttgactgtgaggttgacctggtc

SEQ ID NO: 21661 - DNA, 26 bp, Homo sapiens
ccttgactgtgaggttgacctggtcc

SEQ ID NO: 21662 - DNA, 26 bp, Homo sapiens
cttgactgtgaggttgacctggtcct

SEQ ID NO: 21663 - DNA, 26 bp, Homo sapiens
ttgactgtgaggttgacctggtcctc

SEQ ID NO: 21664 - DNA, 26 bp, Homo sapiens
tgactgtgaggttgacctggtcctcg

SEQ ID NO: 21665 - DNA, 26 bp, Homo sapiens
gactgtgaggttgacctggtcctcgc

SEQ ID NO: 21666 - DNA, 26 bp, Homo sapiens
actgtgaggttgacctggtcctcgcc

SEQ ID NO: 21667 - DNA, 26 bp, Homo sapiens
ctgtgaggttgacctggtcctcgccc

SEQ ID NO: 21668 - DNA, 26 bp, Homo sapiens
tgtgaggttgacctggtcctcgccca

SEQ ID NO: 21669 - DNA, 26 bp, Homo sapiens
gtgaggttgacctggtcctcgcccac

SEQ ID NO: 21670 - DNA, 26 bp, Homo sapiens
tgaggttgacctggtcctcgcccaca

SEQ ID NO: 21671 - DNA, 26 bp, Homo sapiens
gaggttgacctggtcctcgcccacag

SEQ ID NO: 21672 - DNA, 26 bp, Homo sapiens
aggttgacctggtcctcgcccacagg

SEQ ID NO: 21673 - DNA, 26 bp, Homo sapiens
ggttgacctggtcctcgcccacaggg

SEQ ID NO: 21674 - DNA, 26 bp, Homo sapiens
gttgacctggtcctcgcccacagggt

SEQ ID NO: 21675 - DNA, 26 bp, Homo sapiens
ttgacctggtcctcgcccacagggtt

SEQ ID NO: 21676 - DNA, 26 bp, Homo sapiens
tgacctggtcctcgcccacagggttc

SEQ ID NO: 21677 - DNA, 26 bp, Homo sapiens
gacctggtcctcgcccacagggttct

SEQ ID NO: 21678 - DNA, 26 bp, Homo sapiens
acctggtcctcgcccacagggttctt

SEQ ID NO: 21679 - DNA, 26 bp, Homo sapiens
cctggtcctcgcccacagggttcttc

SEQ ID NO: 21680 - DNA, 26 bp, Homo sapiens
ctggtcctcgcccacagggttcttca

SEQ ID NO: 21681 - DNA, 26 bp, Homo sapiens
tggtcctcgcccacagggttcttcac

SEQ ID NO: 21682 - DNA, 26 bp, Homo sapiens
ggtcctcgcccacagggttcttcact

SEQ ID NO: 21683 - DNA, 26 bp, Homo sapiens
gtcctcgcccacagggttcttcactg

SEQ ID NO: 21684 - DNA, 26 bp, Homo sapiens
tcctcgcccacagggttcttcactgt

SEQ ID NO: 21685 - DNA, 26 bp, Homo sapiens
cctcgcccacagggttcttcactgtg

SEQ ID NO: 21686 - DNA, 26 bp, Homo sapiens
ctcgcccacagggttcttcactgtga

SEQ ID NO: 21687 - DNA, 26 bp, Homo sapiens
tcgcccacagggttcttcactgtgac

SEQ ID NO: 21688 - DNA, 26 bp, Homo sapiens
cgcccacagggttcttcactgtgacc

SEQ ID NO: 21689 - DNA, 26 bp, Homo sapiens
gcccacagggttcttcactgtgaccg

SEQ ID NO: 21690 - DNA, 26 bp, Homo sapiens
cccacagggttcttcactgtgaccgt

SEQ ID NO: 21691 - DNA, 26 bp, Homo sapiens
ccacagggttcttcactgtgaccgtg

SEQ ID NO: 21692 - DNA, 26 bp, Homo sapiens
cacagggttcttcactgtgaccgtgt

SEQ ID NO: 21693 - DNA, 26 bp, Homo sapiens
acagggttcttcactgtgaccgtgta

SEQ ID NO: 21694 - DNA, 26 bp, Homo sapiens
cagggttcttcactgtgaccgtgtag

SEQ ID NO: 21695 - DNA, 26 bp, Homo sapiens
agggttcttcactgtgaccgtgtaga

SEQ ID NO: 21696 - DNA, 26 bp, Homo sapiens
gggttcttcactgtgaccgtgtagac

SEQ ID NO: 21697 - DNA, 26 bp, Homo sapiens
ggttcttcactgtgaccgtgtagacg

SEQ ID NO: 21698 - DNA, 26 bp, Homo sapiens
gttcttcactgtgaccgtgtagacgc

SEQ ID NO: 21699 - DNA, 26 bp, Homo sapiens
ttcttcactgtgaccgtgtagacgcc

SEQ ID NO: 21700 - DNA, 26 bp, Homo sapiens
tcttcactgtgaccgtgtagacgccc

SEQ ID NO: 21701 - DNA, 26 bp, Homo sapiens
cttcactgtgaccgtgtagacgccct

SEQ ID NO: 21702 - DNA, 26 bp, Homo sapiens
ttcactgtgaccgtgtagacgccctc

SEQ ID NO: 21703 - DNA, 26 bp, Homo sapiens
tcactgtgaccgtgtagacgccctca

SEQ ID NO: 21704 - DNA, 26 bp, Homo sapiens
cactgtgaccgtgtagacgccctcat

SEQ ID NO: 21705 - DNA, 26 bp, Homo sapiens
actgtgaccgtgtagacgccctcatc

SEQ ID NO: 21706 - DNA, 26 bp, Homo sapiens
ctgtgaccgtgtagacgccctcatct

SEQ ID NO: 21707 - DNA, 26 bp, Homo sapiens
tgtgaccgtgtagacgccctcatctt

SEQ ID NO: 21708 - DNA, 26 bp, Homo sapiens
gtgaccgtgtagacgccctcatcttc

SEQ ID NO: 21709 - DNA, 26 bp, Homo sapiens
tgaccgtgtagacgccctcatcttcc

SEQ ID NO: 21710 - DNA, 26 bp, Homo sapiens
gaccgtgtagacgccctcatcttcct

SEQ ID NO: 21711 - DNA, 26 bp, Homo sapiens
accgtgtagacgccctcatcttcctt

SEQ ID NO: 21712 - DNA, 26 bp, Homo sapiens
ccgtgtagacgccctcatcttccttc

SEQ ID NO: 21713 - DNA, 26 bp, Homo sapiens
cgtgtagacgccctcatcttccttct

SEQ ID NO: 21714 - DNA, 26 bp, Homo sapiens
gtgtagacgccctcatcttccttctc

SEQ ID NO: 21715 - DNA, 26 bp, Homo sapiens
tgtagacgccctcatcttccttctct

SEQ ID NO: 21716 - DNA, 26 bp, Homo sapiens
gtagacgccctcatcttccttctctg

SEQ ID NO: 21717 - DNA, 26 bp, Homo sapiens
tagacgccctcatcttccttctctgc

SEQ ID NO: 21718 - DNA, 26 bp, Homo sapiens
agacgccctcatcttccttctctgcc

SEQ ID NO: 21719 - DNA, 26 bp, Homo sapiens
gacgccctcatcttccttctctgccc

SEQ ID NO: 21720 - DNA, 26 bp, Homo sapiens
acgccctcatcttccttctctgcccc

SEQ ID NO: 21721 - DNA, 26 bp, Homo sapiens
cgccctcatcttccttctctgccccc

SEQ ID NO: 21722 - DNA, 26 bp, Homo sapiens
gccctcatcttccttctctgccccct

SEQ ID NO: 21723 - DNA, 26 bp, Homo sapiens
ccctcatcttccttctctgccccctc

SEQ ID NO: 21724 - DNA, 26 bp, Homo sapiens
cctcatcttccttctctgccccctcg

SEQ ID NO: 21725 - DNA, 26 bp, Homo sapiens
ctcatcttccttctctgccccctcga

SEQ ID NO: 21726 - DNA, 26 bp, Homo sapiens
tcatcttccttctctgccccctcgac

SEQ ID NO: 21727 - DNA, 26 bp, Homo sapiens
catcttccttctctgccccctcgacc

SEQ ID NO: 21728 - DNA, 26 bp, Homo sapiens
atcttccttctctgccccctcgaccg

SEQ ID NO: 21729 - DNA, 26 bp, Homo sapiens
tcttccttctctgccccctcgaccgt

SEQ ID NO: 21730 - DNA, 26 bp, Homo sapiens
cttccttctctgccccctcgaccgtg

SEQ ID NO: 21731 - DNA, 26 bp, Homo sapiens
ttccttctctgccccctcgaccgtga

SEQ ID NO: 21732 - DNA, 26 bp, Homo sapiens
tccttctctgccccctcgaccgtgaa

SEQ ID NO: 21733 - DNA, 26 bp, Homo sapiens
ccttctctgccccctcgaccgtgaag

SEQ ID NO: 21734 - DNA, 26 bp, Homo sapiens
cttctctgccccctcgaccgtgaaga

SEQ ID NO: 21735 - DNA, 26 bp, Homo sapiens
ttctctgccccctcgaccgtgaagat

SEQ ID NO: 21736 - DNA, 26 bp, Homo sapiens
tctctgccccctcgaccgtgaagatg

SEQ ID NO: 21737 - DNA, 26 bp, Homo sapiens
ctctgccccctcgaccgtgaagatgc

SEQ ID NO: 21738 - DNA, 26 bp, Homo sapiens
tctgccccctcgaccgtgaagatgct

SEQ ID NO: 21739 - DNA, 26 bp, Homo sapiens
ctgccccctcgaccgtgaagatgctg

SEQ ID NO: 21740 - DNA, 26 bp, Homo sapiens
tgccccctcgaccgtgaagatgctgc

SEQ ID NO: 21741 - DNA, 26 bp, Homo sapiens
gccccctcgaccgtgaagatgctgcg

SEQ ID NO: 21742 - DNA, 26 bp, Homo sapiens
ccccctcgaccgtgaagatgctgcgg

SEQ ID NO: 21743 - DNA, 26 bp, Homo sapiens
cccctcgaccgtgaagatgctgcggt

SEQ ID NO: 21744 - DNA, 26 bp, Homo sapiens
ccctcgaccgtgaagatgctgcggtc

SEQ ID NO: 21745 - DNA, 26 bp, Homo sapiens
cctcgaccgtgaagatgctgcggtcc

SEQ ID NO: 21746 - DNA, 26 bp, Homo sapiens
ctcgaccgtgaagatgctgcggtcct

SEQ ID NO: 21747 - DNA, 26 bp, Homo sapiens
tcgaccgtgaagatgctgcggtcctt

SEQ ID NO: 21748 - DNA, 26 bp, Homo sapiens
cgaccgtgaagatgctgcggtccttg

SEQ ID NO: 21749 - DNA, 26 bp, Homo sapiens
gaccgtgaagatgctgcggtccttgg

SEQ ID NO: 21750 - DNA, 26 bp, Homo sapiens
accgtgaagatgctgcggtccttggt

SEQ ID NO: 21751 - DNA, 26 bp, Homo sapiens
ccgtgaagatgctgcggtccttggtg

SEQ ID NO: 21752 - DNA, 26 bp, Homo sapiens
cgtgaagatgctgcggtccttggtgg

SEQ ID NO: 21753 - DNA, 26 bp, Homo sapiens
gtgaagatgctgcggtccttggtggt

SEQ ID NO: 21754 - DNA, 26 bp, Homo sapiens
tgaagatgctgcggtccttggtggtc

SEQ ID NO: 21755 - DNA, 26 bp, Homo sapiens
gaagatgctgcggtccttggtggtct

SEQ ID NO: 21756 - DNA, 26 bp, Homo sapiens
aagatgctgcggtccttggtggtctc

SEQ ID NO: 21757 - DNA, 26 bp, Homo sapiens
agatgctgcggtccttggtggtctcc

SEQ ID NO: 21758 - DNA, 26 bp, Homo sapiens
gatgctgcggtccttggtggtctcca

SEQ ID NO: 21759 - DNA, 26 bp, Homo sapiens
atgctgcggtccttggtggtctccac

SEQ ID NO: 21760 - DNA, 26 bp, Homo sapiens
tgctgcggtccttggtggtctccacg

SEQ ID NO: 21761 - DNA, 26 bp, Homo sapiens
gctgcggtccttggtggtctccacgc

SEQ ID NO: 21762 - DNA, 26 bp, Homo sapiens
ctgcggtccttggtggtctccacgcg

SEQ ID NO: 21763 - DNA, 26 bp, Homo sapiens
tgcggtccttggtggtctccacgcgg

SEQ ID NO: 21764 - DNA, 26 bp, Homo sapiens
gcggtccttggtggtctccacgcgga

SEQ ID NO: 21765 - DNA, 26 bp, Homo sapiens
cggtccttggtggtctccacgcggac

SEQ ID NO: 21766 - DNA, 26 bp, Homo sapiens
ggtccttggtggtctccacgcggacc

SEQ ID NO: 21767 - DNA, 26 bp, Homo sapiens
gtccttggtggtctccacgcggaccc

SEQ ID NO: 21768 - DNA, 26 bp, Homo sapiens
tccttggtggtctccacgcggacccg

SEQ ID NO: 21769 - DNA, 26 bp, Homo sapiens
ccttggtggtctccacgcggacccgg

SEQ ID NO: 21770 - DNA, 26 bp, Homo sapiens
cttggtggtctccacgcggacccggc

SEQ ID NO: 21771 - DNA, 26 bp, Homo sapiens
ttggtggtctccacgcggacccggcc

SEQ ID NO: 21772 - DNA, 26 bp, Homo sapiens
tggtggtctccacgcggacccggccc

SEQ ID NO: 21773 - DNA, 26 bp, Homo sapiens
ggtggtctccacgcggacccggccct

SEQ ID NO: 21774 - DNA, 26 bp, Homo sapiens
gtggtctccacgcggacccggccctc

SEQ ID NO: 21775 - DNA, 26 bp, Homo sapiens
tggtctccacgcggacccggccctcg

SEQ ID NO: 21776 - DNA, 26 bp, Homo sapiens
ggtctccacgcggacccggccctcgg

SEQ ID NO: 21777 - DNA, 26 bp, Homo sapiens
gtctccacgcggacccggccctcggt

SEQ ID NO: 21778 - DNA, 26 bp, Homo sapiens
tctccacgcggacccggccctcggtc

SEQ ID NO: 21779 - DNA, 26 bp, Homo sapiens
ctccacgcggacccggccctcggtct

SEQ ID NO: 21780 - DNA, 26 bp, Homo sapiens
tccacgcggacccggccctcggtctc

SEQ ID NO: 21781 - DNA, 26 bp, Homo sapiens
ccacgcggacccggccctcggtctca

SEQ ID NO: 21782 - DNA, 26 bp, Homo sapiens
cacgcggacccggccctcggtctcac

SEQ ID NO: 21783 - DNA, 26 bp, Homo sapiens
acgcggacccggccctcggtctcaca

SEQ ID NO: 21784 - DNA, 26 bp, Homo sapiens
cgcggacccggccctcggtctcacac

SEQ ID NO: 21785 - DNA, 26 bp, Homo sapiens
gcggacccggccctcggtctcacaca

SEQ ID NO: 21786 - DNA, 26 bp, Homo sapiens
cggacccggccctcggtctcacacag

SEQ ID NO: 21787 - DNA, 26 bp, Homo sapiens
ggacccggccctcggtctcacacagc

SEQ ID NO: 21788 - DNA, 26 bp, Homo sapiens
gacccggccctcggtctcacacagca

SEQ ID NO: 21789 - DNA, 26 bp, Homo sapiens
acccggccctcggtctcacacagcag

SEQ ID NO: 21790 - DNA, 26 bp, Homo sapiens
cccggccctcggtctcacacagcagc

SEQ ID NO: 21791 - DNA, 26 bp, Homo sapiens
ccggccctcggtctcacacagcagct

SEQ ID NO: 21792 - DNA, 26 bp, Homo sapiens
cggccctcggtctcacacagcagctt

SEQ ID NO: 21793 - DNA, 26 bp, Homo sapiens
ggccctcggtctcacacagcagcttc

SEQ ID NO: 21794 - DNA, 26 bp, Homo sapiens
gccctcggtctcacacagcagcttct

SEQ ID NO: 21795 - DNA, 26 bp, Homo sapiens
ccctcggtctcacacagcagcttctt

SEQ ID NO: 21796 - DNA, 26 bp, Homo sapiens
cctcggtctcacacagcagcttcttg

SEQ ID NO: 21797 - DNA, 26 bp, Homo sapiens
ctcggtctcacacagcagcttcttgt

SEQ ID NO: 21798 - DNA, 26 bp, Homo sapiens
tcggtctcacacagcagcttcttgtc

SEQ ID NO: 21799 - DNA, 26 bp, Homo sapiens
cggtctcacacagcagcttcttgtca

SEQ ID NO: 21800 - DNA, 26 bp, Homo sapiens
ggtctcacacagcagcttcttgtcaa

SEQ ID NO: 21801 - DNA, 26 bp, Homo sapiens
gtctcacacagcagcttcttgtcaaa

SEQ ID NO: 21802 - DNA, 26 bp, Homo sapiens
tctcacacagcagcttcttgtcaaac

SEQ ID NO: 21803 - DNA, 26 bp, Homo sapiens
ctcacacagcagcttcttgtcaaaca

SEQ ID NO: 21804 - DNA, 26 bp, Homo sapiens
tcacacagcagcttcttgtcaaacac

SEQ ID NO: 21805 - DNA, 26 bp, Homo sapiens
cacacagcagcttcttgtcaaacacc

SEQ ID NO: 21806 - DNA, 26 bp, Homo sapiens
acacagcagcttcttgtcaaacaccc

SEQ ID NO: 21807 - DNA, 26 bp, Homo sapiens
cacagcagcttcttgtcaaacaccca

SEQ ID NO: 21808 - DNA, 26 bp, Homo sapiens
acagcagcttcttgtcaaacacccac

SEQ ID NO: 21809 - DNA, 26 bp, Homo sapiens
cagcagcttcttgtcaaacacccact

SEQ ID NO: 21810 - DNA, 26 bp, Homo sapiens
agcagcttcttgtcaaacacccactc

SEQ ID NO: 21811 - DNA, 26 bp, Homo sapiens
gcagcttcttgtcaaacacccactca

SEQ ID NO: 21812 - DNA, 26 bp, Homo sapiens
cagcttcttgtcaaacacccactcat

SEQ ID NO: 21813 - DNA, 26 bp, Homo sapiens
agcttcttgtcaaacacccactcatc

SEQ ID NO: 21814 - DNA, 26 bp, Homo sapiens
gcttcttgtcaaacacccactcatcg

SEQ ID NO: 21815 - DNA, 26 bp, Homo sapiens
cttcttgtcaaacacccactcatcgc

SEQ ID NO: 21816 - DNA, 26 bp, Homo sapiens
ttcttgtcaaacacccactcatcgct

SEQ ID NO: 21817 - DNA, 26 bp, Homo sapiens
tcttgtcaaacacccactcatcgctg

SEQ ID NO: 21818 - DNA, 26 bp, Homo sapiens
cttgtcaaacacccactcatcgctgt

SEQ ID NO: 21819 - DNA, 26 bp, Homo sapiens
ttgtcaaacacccactcatcgctgtc

SEQ ID NO: 21820 - DNA, 26 bp, Homo sapiens
tgtcaaacacccactcatcgctgtca

SEQ ID NO: 21821 - DNA, 26 bp, Homo sapiens
gtcaaacacccactcatcgctgtcac

SEQ ID NO: 21822 - DNA, 26 bp, Homo sapiens
tcaaacacccactcatcgctgtcacc

SEQ ID NO: 21823 - DNA, 26 bp, Homo sapiens
caaacacccactcatcgctgtcacct

SEQ ID NO: 21824 - DNA, 26 bp, Homo sapiens
aaacacccactcatcgctgtcacctg

SEQ ID NO: 21825 - DNA, 26 bp, Homo sapiens
aacacccactcatcgctgtcacctgt

SEQ ID NO: 21826 - DNA, 26 bp, Homo sapiens
acacccactcatcgctgtcacctgtg

SEQ ID NO: 21827 - DNA, 26 bp, Homo sapiens
cacccactcatcgctgtcacctgtgt

SEQ ID NO: 21828 - DNA, 26 bp, Homo sapiens
acccactcatcgctgtcacctgtgtc

SEQ ID NO: 21829 - DNA, 26 bp, Homo sapiens
cccactcatcgctgtcacctgtgtcc

SEQ ID NO: 21830 - DNA, 26 bp, Homo sapiens
ccactcatcgctgtcacctgtgtcct

SEQ ID NO: 21831 - DNA, 26 bp, Homo sapiens
cactcatcgctgtcacctgtgtcctc

SEQ ID NO: 21832 - DNA, 26 bp, Homo sapiens
actcatcgctgtcacctgtgtcctct

SEQ ID NO: 21833 - DNA, 26 bp, Homo sapiens
ctcatcgctgtcacctgtgtcctctg

SEQ ID NO: 21834 - DNA, 26 bp, Homo sapiens
tcatcgctgtcacctgtgtcctctgg

SEQ ID NO: 21835 - DNA, 26 bp, Homo sapiens
catcgctgtcacctgtgtcctctggg

SEQ ID NO: 21836 - DNA, 26 bp, Homo sapiens
atcgctgtcacctgtgtcctctgggg

SEQ ID NO: 21837 - DNA, 26 bp, Homo sapiens
tcgctgtcacctgtgtcctctggggc

SEQ ID NO: 21838 - DNA, 26 bp, Homo sapiens
cgctgtcacctgtgtcctctggggca

SEQ ID NO: 21839 - DNA, 26 bp, Homo sapiens
gctgtcacctgtgtcctctggggcat

SEQ ID NO: 21840 - DNA, 26 bp, Homo sapiens
ctgtcacctgtgtcctctggggcatc

SEQ ID NO: 21841 - DNA, 26 bp, Homo sapiens
tgtcacctgtgtcctctggggcatct

SEQ ID NO: 21842 - DNA, 26 bp, Homo sapiens
gtcacctgtgtcctctggggcatctg

SEQ ID NO: 21843 - DNA, 26 bp, Homo sapiens
tcacctgtgtcctctggggcatctgg

SEQ ID NO: 21844 - DNA, 26 bp, Homo sapiens
cacctgtgtcctctggggcatctggg

SEQ ID NO: 21845 - DNA, 26 bp, Homo sapiens
acctgtgtcctctggggcatctgggg

SEQ ID NO: 21846 - DNA, 26 bp, Homo sapiens
cctgtgtcctctggggcatctggggc

SEQ ID NO: 21847 - DNA, 26 bp, Homo sapiens
ctgtgtcctctggggcatctggggct

SEQ ID NO: 21848 - DNA, 26 bp, Homo sapiens
tgtgtcctctggggcatctggggctg

SEQ ID NO: 21849 - DNA, 26 bp, Homo sapiens
gtgtcctctggggcatctggggctgg

SEQ ID NO: 21850 - DNA, 26 bp, Homo sapiens
tgtcctctggggcatctggggctggc

SEQ ID NO: 21851 - DNA, 26 bp, Homo sapiens
gtcctctggggcatctggggctggcc

SEQ ID NO: 21852 - DNA, 26 bp, Homo sapiens
tcctctggggcatctggggctggcct

SEQ ID NO: 21853 - DNA, 26 bp, Homo sapiens
cctctggggcatctggggctggcctg

SEQ ID NO: 21854 - DNA, 26 bp, Homo sapiens
ctctggggcatctggggctggcctgg

SEQ ID NO: 21855 - DNA, 26 bp, Homo sapiens
tctggggcatctggggctggcctggc

SEQ ID NO: 21856 - DNA, 26 bp, Homo sapiens
ctggggcatctggggctggcctggct

SEQ ID NO: 21857 - DNA, 26 bp, Homo sapiens
tggggcatctggggctggcctggctg

SEQ ID NO: 21858 - DNA, 26 bp, Homo sapiens
ggggcatctggggctggcctggctgg

SEQ ID NO: 21859 - DNA, 26 bp, Homo sapiens
gggcatctggggctggcctggctggg

SEQ ID NO: 21860 - DNA, 26 bp, Homo sapiens
ggcatctggggctggcctggctgggg

SEQ ID NO: 21861 - DNA, 26 bp, Homo sapiens
gcatctggggctggcctggctggggc

SEQ ID NO: 21862 - DNA, 26 bp, Homo sapiens
catctggggctggcctggctggggcc

SEQ ID NO: 21863 - DNA, 26 bp, Homo sapiens
atctggggctggcctggctggggcct

SEQ ID NO: 21864 - DNA, 26 bp, Homo sapiens
tctggggctggcctggctggggcctt

SEQ ID NO: 21865 - DNA, 26 bp, Homo sapiens
ctggggctggcctggctggggcctta

SEQ ID NO: 21866 - DNA, 26 bp, Homo sapiens
tggggctggcctggctggggccttat

SEQ ID NO: 21867 - DNA, 26 bp, Homo sapiens
ggggctggcctggctggggccttatt

SEQ ID NO: 21868 - DNA, 26 bp, Homo sapiens
gggctggcctggctggggccttattc

SEQ ID NO: 21869 - DNA, 26 bp, Homo sapiens
ggctggcctggctggggccttattcc

SEQ ID NO: 21870 - DNA, 26 bp, Homo sapiens
gctggcctggctggggccttattccc

SEQ ID NO: 21871 - DNA, 26 bp, Homo sapiens
ctggcctggctggggccttattcccc

SEQ ID NO: 21872 - DNA, 26 bp, Homo sapiens
tggcctggctggggccttattcccct

SEQ ID NO: 21873 - DNA, 26 bp, Homo sapiens
ggcctggctggggccttattcccctg

SEQ ID NO: 21874 - DNA, 26 bp, Homo sapiens
gcctggctggggccttattcccctgc

SEQ ID NO: 21875 - DNA, 26 bp, Homo sapiens
cctggctggggccttattcccctgcg

SEQ ID NO: 21876 - DNA, 26 bp, Homo sapiens
ctggctggggccttattcccctgcgt

SEQ ID NO: 21877 - DNA, 26 bp, Homo sapiens
tggctggggccttattcccctgcgtg

SEQ ID NO: 21878 - DNA, 26 bp, Homo sapiens
ggctggggccttattcccctgcgtga

SEQ ID NO: 21879 - DNA, 26 bp, Homo sapiens
gctggggccttattcccctgcgtgat

SEQ ID NO: 21880 - DNA, 26 bp, Homo sapiens
ctggggccttattcccctgcgtgata

SEQ ID NO: 21881 - DNA, 26 bp, Homo sapiens
tggggccttattcccctgcgtgatag

SEQ ID NO: 21882 - DNA, 26 bp, Homo sapiens
ggggccttattcccctgcgtgatagc

SEQ ID NO: 21883 - DNA, 26 bp, Homo sapiens
gggccttattcccctgcgtgatagcc

SEQ ID NO: 21884 - DNA, 26 bp, Homo sapiens
ggccttattcccctgcgtgatagcct

SEQ ID NO: 21885 - DNA, 26 bp, Homo sapiens
gccttattcccctgcgtgatagcctt

SEQ ID NO: 21886 - DNA, 26 bp, Homo sapiens
ccttattcccctgcgtgatagccttc

SEQ ID NO: 21887 - DNA, 26 bp, Homo sapiens
cttattcccctgcgtgatagccttct

SEQ ID NO: 21888 - DNA, 26 bp, Homo sapiens
ttattcccctgcgtgatagccttctg

SEQ ID NO: 21889 - DNA, 26 bp, Homo sapiens
tattcccctgcgtgatagccttctgc

SEQ ID NO: 21890 - DNA, 26 bp, Homo sapiens
attcccctgcgtgatagccttctgcc

SEQ ID NO: 21891 - DNA, 26 bp, Homo sapiens
ttcccctgcgtgatagccttctgcca

SEQ ID NO: 21892 - DNA, 26 bp, Homo sapiens
tcccctgcgtgatagccttctgccag

SEQ ID NO: 21893 - DNA, 26 bp, Homo sapiens
cccctgcgtgatagccttctgccaga

SEQ ID NO: 21894 - DNA, 26 bp, Homo sapiens
ccctgcgtgatagccttctgccagat

SEQ ID NO: 21895 - DNA, 26 bp, Homo sapiens
cctgcgtgatagccttctgccagatc

SEQ ID NO: 21896 - DNA, 26 bp, Homo sapiens
ctgcgtgatagccttctgccagatca

SEQ ID NO: 21897 - DNA, 26 bp, Homo sapiens
tgcgtgatagccttctgccagatcac

SEQ ID NO: 21898 - DNA, 26 bp, Homo sapiens
gcgtgatagccttctgccagatcaca

SEQ ID NO: 21899 - DNA, 26 bp, Homo sapiens
cgtgatagccttctgccagatcacag

SEQ ID NO: 21900 - DNA, 26 bp, Homo sapiens
gtgatagccttctgccagatcacagt

SEQ ID NO: 21901 - DNA, 26 bp, Homo sapiens
tgatagccttctgccagatcacagtg

SEQ ID NO: 21902 - DNA, 26 bp, Homo sapiens
gatagccttctgccagatcacagtgg

SEQ ID NO: 21903 - DNA, 26 bp, Homo sapiens
atagccttctgccagatcacagtggg

SEQ ID NO: 21904 - DNA, 26 bp, Homo sapiens
tagccttctgccagatcacagtggga

SEQ ID NO: 21905 - DNA, 26 bp, Homo sapiens
agccttctgccagatcacagtgggag

SEQ ID NO: 21906 - DNA, 26 bp, Homo sapiens
gccttctgccagatcacagtgggagc

SEQ ID NO: 21907 - DNA, 26 bp, Homo sapiens
ccttctgccagatcacagtgggagca

SEQ ID NO: 21908 - DNA, 26 bp, Homo sapiens
cttctgccagatcacagtgggagcag

SEQ ID NO: 21909 - DNA, 26 bp, Homo sapiens
ttctgccagatcacagtgggagcagg

SEQ ID NO: 21910 - DNA, 26 bp, Homo sapiens
tctgccagatcacagtgggagcaggg

SEQ ID NO: 21911 - DNA, 26 bp, Homo sapiens
ctgccagatcacagtgggagcagggt

SEQ ID NO: 21912 - DNA, 26 bp, Homo sapiens
tgccagatcacagtgggagcagggtc

SEQ ID NO: 21913 - DNA, 26 bp, Homo sapiens
gccagatcacagtgggagcagggtcc

SEQ ID NO: 21914 - DNA, 26 bp, Homo sapiens
ccagatcacagtgggagcagggtccc

SEQ ID NO: 21915 - DNA, 26 bp, Homo sapiens
cagatcacagtgggagcagggtcccc

SEQ ID NO: 21916 - DNA, 26 bp, Homo sapiens
agatcacagtgggagcagggtcccca

SEQ ID NO: 21917 - DNA, 26 bp, Homo sapiens
gatcacagtgggagcagggtccccag

SEQ ID NO: 21918 - DNA, 26 bp, Homo sapiens
atcacagtgggagcagggtccccaga

SEQ ID NO: 21919 - DNA, 26 bp, Homo sapiens
tcacagtgggagcagggtccccagag

SEQ ID NO: 21920 - DNA, 26 bp, Homo sapiens
cacagtgggagcagggtccccagaga

SEQ ID NO: 21921 - DNA, 26 bp, Homo sapiens
acagtgggagcagggtccccagagat

SEQ ID NO: 21922 - DNA, 26 bp, Homo sapiens
cagtgggagcagggtccccagagata

SEQ ID NO: 21923 - DNA, 26 bp, Homo sapiens
agtgggagcagggtccccagagatag

SEQ ID NO: 21924 - DNA, 26 bp, Homo sapiens
gtgggagcagggtccccagagatagg

SEQ ID NO: 21925 - DNA, 26 bp, Homo sapiens
tgggagcagggtccccagagataggg

SEQ ID NO: 21926 - DNA, 26 bp, Homo sapiens
gggagcagggtccccagagataggga

SEQ ID NO: 21927 - DNA, 26 bp, Homo sapiens
ggagcagggtccccagagatagggac

SEQ ID NO: 21928 - DNA, 26 bp, Homo sapiens
gagcagggtccccagagatagggacg

SEQ ID NO: 21929 - DNA, 26 bp, Homo sapiens
agcagggtccccagagatagggacgt

SEQ ID NO: 21930 - DNA, 26 bp, Homo sapiens
gcagggtccccagagatagggacgtc

SEQ ID NO: 21931 - DNA, 26 bp, Homo sapiens
cagggtccccagagatagggacgtcc

SEQ ID NO: 21932 - DNA, 26 bp, Homo sapiens
agggtccccagagatagggacgtcca

SEQ ID NO: 21933 - DNA, 26 bp, Homo sapiens
gggtccccagagatagggacgtccag

SEQ ID NO: 21934 - DNA, 26 bp, Homo sapiens
ggtccccagagatagggacgtccaga

SEQ ID NO: 21935 - DNA, 26 bp, Homo sapiens
gtccccagagatagggacgtccagac

SEQ ID NO: 21936 - DNA, 26 bp, Homo sapiens
tccccagagatagggacgtccagacg

SEQ ID NO: 21937 - DNA, 26 bp, Homo sapiens
ccccagagatagggacgtccagacgt

SEQ ID NO: 21938 - DNA, 26 bp, Homo sapiens
cccagagatagggacgtccagacgta

SEQ ID NO: 21939 - DNA, 26 bp, Homo sapiens
ccagagatagggacgtccagacgtag

SEQ ID NO: 21940 - DNA, 26 bp, Homo sapiens
cagagatagggacgtccagacgtagc

SEQ ID NO: 21941 - DNA, 26 bp, Homo sapiens
agagatagggacgtccagacgtagct

SEQ ID NO: 21942 - DNA, 26 bp, Homo sapiens
gagatagggacgtccagacgtagctt

SEQ ID NO: 21943 - DNA, 26 bp, Homo sapiens
agatagggacgtccagacgtagctta

SEQ ID NO: 21944 - DNA, 26 bp, Homo sapiens
gatagggacgtccagacgtagcttat

SEQ ID NO: 21945 - DNA, 26 bp, Homo sapiens
atagggacgtccagacgtagcttatt

SEQ ID NO: 21946 - DNA, 26 bp, Homo sapiens
tagggacgtccagacgtagcttattt

SEQ ID NO: 21947 - DNA, 26 bp, Homo sapiens
agggacgtccagacgtagcttatttc

SEQ ID NO: 21948 - DNA, 26 bp, Homo sapiens
gggacgtccagacgtagcttatttcc

SEQ ID NO: 21949 - DNA, 26 bp, Homo sapiens
ggacgtccagacgtagcttatttcca

SEQ ID NO: 21950 - DNA, 26 bp, Homo sapiens
gacgtccagacgtagcttatttccag

SEQ ID NO: 21951 - DNA, 26 bp, Homo sapiens
acgtccagacgtagcttatttccagc

SEQ ID NO: 21952 - DNA, 26 bp, Homo sapiens
cgtccagacgtagcttatttccagct

SEQ ID NO: 21953 - DNA, 26 bp, Homo sapiens
gtccagacgtagcttatttccagcta

SEQ ID NO: 21954 - DNA, 26 bp, Homo sapiens
tccagacgtagcttatttccagctac

SEQ ID NO: 21955 - DNA, 26 bp, Homo sapiens
ccagacgtagcttatttccagctaca

SEQ ID NO: 21956 - DNA, 26 bp, Homo sapiens
cagacgtagcttatttccagctacaa

SEQ ID NO: 21957 - DNA, 26 bp, Homo sapiens
agacgtagcttatttccagctacaac

SEQ ID NO: 21958 - DNA, 26 bp, Homo sapiens
gacgtagcttatttccagctacaacc

SEQ ID NO: 21959 - DNA, 26 bp, Homo sapiens
acgtagcttatttccagctacaacca

SEQ ID NO: 21960 - DNA, 26 bp, Homo sapiens
cgtagcttatttccagctacaaccac

SEQ ID NO: 21961 - DNA, 26 bp, Homo sapiens
gtagcttatttccagctacaaccaca

SEQ ID NO: 21962 - DNA, 26 bp, Homo sapiens
tagcttatttccagctacaaccacaa

SEQ ID NO: 21963 - DNA, 26 bp, Homo sapiens
agcttatttccagctacaaccacaat

SEQ ID NO: 21964 - DNA, 26 bp, Homo sapiens
gcttatttccagctacaaccacaatg

SEQ ID NO: 21965 - DNA, 26 bp, Homo sapiens
cttatttccagctacaaccacaatgg

SEQ ID NO: 21966 - DNA, 26 bp, Homo sapiens
ttatttccagctacaaccacaatggt

SEQ ID NO: 21967 - DNA, 26 bp, Homo sapiens
tatttccagctacaaccacaatggtg

SEQ ID NO: 21968 - DNA, 26 bp, Homo sapiens
atttccagctacaaccacaatggtgt

SEQ ID NO: 21969 - DNA, 26 bp, Homo sapiens
tttccagctacaaccacaatggtgtc

SEQ ID NO: 21970 - DNA, 26 bp, Homo sapiens
ttccagctacaaccacaatggtgtct

SEQ ID NO: 21971 - DNA, 26 bp, Homo sapiens
tccagctacaaccacaatggtgtctg

SEQ ID NO: 21972 - DNA, 26 bp, Homo sapiens
ccagctacaaccacaatggtgtctgg

SEQ ID NO: 21973 - DNA, 26 bp, Homo sapiens
cagctacaaccacaatggtgtctggt

SEQ ID NO: 21974 - DNA, 26 bp, Homo sapiens
agctacaaccacaatggtgtctggta

SEQ ID NO: 21975 - DNA, 26 bp, Homo sapiens
gctacaaccacaatggtgtctggtat

SEQ ID NO: 21976 - DNA, 26 bp, Homo sapiens
ctacaaccacaatggtgtctggtatg

SEQ ID NO: 21977 - DNA, 26 bp, Homo sapiens
tacaaccacaatggtgtctggtatgc

SEQ ID NO: 21978 - DNA, 26 bp, Homo sapiens
acaaccacaatggtgtctggtatgcg

SEQ ID NO: 21979 - DNA, 26 bp, Homo sapiens
caaccacaatggtgtctggtatgcgg

SEQ ID NO: 21980 - DNA, 26 bp, Homo sapiens
aaccacaatggtgtctggtatgcggc

SEQ ID NO: 21981 - DNA, 26 bp, Homo sapiens
accacaatggtgtctggtatgcggcc

SEQ ID NO: 21982 - DNA, 26 bp, Homo sapiens
ccacaatggtgtctggtatgcggcct

SEQ ID NO: 21983 - DNA, 26 bp, Homo sapiens
cacaatggtgtctggtatgcggcctg

SEQ ID NO: 21984 - DNA, 26 bp, Homo sapiens
acaatggtgtctggtatgcggcctgg

SEQ ID NO: 21985 - DNA, 26 bp, Homo sapiens
caatggtgtctggtatgcggcctggg

SEQ ID NO: 21986 - DNA, 26 bp, Homo sapiens
aatggtgtctggtatgcggcctgggc

SEQ ID NO: 21987 - DNA, 26 bp, Homo sapiens
atggtgtctggtatgcggcctgggca

SEQ ID NO: 21988 - DNA, 26 bp, Homo sapiens
tggtgtctggtatgcggcctgggcag

SEQ ID NO: 21989 - DNA, 26 bp, Homo sapiens
ggtgtctggtatgcggcctgggcagt

SEQ ID NO: 21990 - DNA, 26 bp, Homo sapiens
gtgtctggtatgcggcctgggcagtc

SEQ ID NO: 21991 - DNA, 26 bp, Homo sapiens
tgtctggtatgcggcctgggcagtcc

SEQ ID NO: 21992 - DNA, 26 bp, Homo sapiens
gtctggtatgcggcctgggcagtcca

SEQ ID NO: 21993 - DNA, 26 bp, Homo sapiens
tctggtatgcggcctgggcagtccag

SEQ ID NO: 21994 - DNA, 26 bp, Homo sapiens
ctggtatgcggcctgggcagtccagg

SEQ ID NO: 21995 - DNA, 26 bp, Homo sapiens
tggtatgcggcctgggcagtccaggt

SEQ ID NO: 21996 - DNA, 26 bp, Homo sapiens
ggtatgcggcctgggcagtccaggtg

SEQ ID NO: 21997 - DNA, 26 bp, Homo sapiens
gtatgcggcctgggcagtccaggtgg

SEQ ID NO: 21998 - DNA, 26 bp, Homo sapiens
tatgcggcctgggcagtccaggtgga

SEQ ID NO: 21999 - DNA, 26 bp, Homo sapiens
atgcggcctgggcagtccaggtggat

SEQ ID NO: 22000 - DNA, 26 bp, Homo sapiens
tgcggcctgggcagtccaggtggatc

SEQ ID NO: 22001 - DNA, 26 bp, Homo sapiens
gcggcctgggcagtccaggtggatct

SEQ ID NO: 22002 - DNA, 26 bp, Homo sapiens
cggcctgggcagtccaggtggatctt

SEQ ID NO: 22003 - DNA, 26 bp, Homo sapiens
ggcctgggcagtccaggtggatcttg

SEQ ID NO: 22004 - DNA, 26 bp, Homo sapiens
gcctgggcagtccaggtggatcttgg

SEQ ID NO: 22005 - DNA, 26 bp, Homo sapiens
cctgggcagtccaggtggatcttggg

SEQ ID NO: 22006 - DNA, 26 bp, Homo sapiens
ctgggcagtccaggtggatcttggga

SEQ ID NO: 22007 - DNA, 26 bp, Homo sapiens
tgggcagtccaggtggatcttgggag

SEQ ID NO: 22008 - DNA, 26 bp, Homo sapiens
gggcagtccaggtggatcttgggagg

SEQ ID NO: 22009 - DNA, 26 bp, Homo sapiens
ggcagtccaggtggatcttgggaggt

SEQ ID NO: 22010 - DNA, 26 bp, Homo sapiens
gcagtccaggtggatcttgggaggtt

SEQ ID NO: 22011 - DNA, 26 bp, Homo sapiens
cagtccaggtggatcttgggaggttc

SEQ ID NO: 22012 - DNA, 26 bp, Homo sapiens
agtccaggtggatcttgggaggttcc

SEQ ID NO: 22013 - DNA, 26 bp, Homo sapiens
gtccaggtggatcttgggaggttcct

SEQ ID NO: 22014 - DNA, 26 bp, Homo sapiens
tccaggtggatcttgggaggttcctg

SEQ ID NO: 22015 - DNA, 26 bp, Homo sapiens
ccaggtggatcttgggaggttcctgc

SEQ ID NO: 22016 - DNA, 26 bp, Homo sapiens
caggtggatcttgggaggttcctgcc

SEQ ID NO: 22017 - DNA, 26 bp, Homo sapiens
aggtggatcttgggaggttcctgcct

SEQ ID NO: 22018 - DNA, 26 bp, Homo sapiens
ggtggatcttgggaggttcctgcctg

SEQ ID NO: 22019 - DNA, 26 bp, Homo sapiens
gtggatcttgggaggttcctgcctgg

SEQ ID NO: 22020 - DNA, 26 bp, Homo sapiens
tggatcttgggaggttcctgcctggg

SEQ ID NO: 22021 - DNA, 26 bp, Homo sapiens
ggatcttgggaggttcctgcctgggt

SEQ ID NO: 22022 - DNA, 26 bp, Homo sapiens
gatcttgggaggttcctgcctgggta

SEQ ID NO: 22023 - DNA, 26 bp, Homo sapiens
atcttgggaggttcctgcctgggtac

SEQ ID NO: 22024 - DNA, 26 bp, Homo sapiens
tcttgggaggttcctgcctgggtacg

SEQ ID NO: 22025 - DNA, 26 bp, Homo sapiens
cttgggaggttcctgcctgggtacga

SEQ ID NO: 22026 - DNA, 26 bp, Homo sapiens
ttgggaggttcctgcctgggtacgaa

SEQ ID NO: 22027 - DNA, 26 bp, Homo sapiens
tgggaggttcctgcctgggtacgaag

SEQ ID NO: 22028 - DNA, 26 bp, Homo sapiens
gggaggttcctgcctgggtacgaagt

SEQ ID NO: 22029 - DNA, 26 bp, Homo sapiens
ggaggttcctgcctgggtacgaagtc

SEQ ID NO: 22030 - DNA, 26 bp, Homo sapiens
gaggttcctgcctgggtacgaagtca

SEQ ID NO: 22031 - DNA, 26 bp, Homo sapiens
aggttcctgcctgggtacgaagtcaa

SEQ ID NO: 22032 - DNA, 26 bp, Homo sapiens
ggttcctgcctgggtacgaagtcaat

SEQ ID NO: 22033 - DNA, 26 bp, Homo sapiens
gttcctgcctgggtacgaagtcaatc

SEQ ID NO: 22034 - DNA, 26 bp, Homo sapiens
ttcctgcctgggtacgaagtcaatct

SEQ ID NO: 22035 - DNA, 26 bp, Homo sapiens
tcctgcctgggtacgaagtcaatctt

SEQ ID NO: 22036 - DNA, 26 bp, Homo sapiens
cctgcctgggtacgaagtcaatcttg

SEQ ID NO: 22037 - DNA, 26 bp, Homo sapiens
ctgcctgggtacgaagtcaatcttga

SEQ ID NO: 22038 - DNA, 26 bp, Homo sapiens
tgcctgggtacgaagtcaatcttgac

SEQ ID NO: 22039 - DNA, 26 bp, Homo sapiens
gcctgggtacgaagtcaatcttgacc

SEQ ID NO: 22040 - DNA, 26 bp, Homo sapiens
cctgggtacgaagtcaatcttgacct

SEQ ID NO: 22041 - DNA, 26 bp, Homo sapiens
ctgggtacgaagtcaatcttgacctc

SEQ ID NO: 22042 - DNA, 26 bp, Homo sapiens
tgggtacgaagtcaatcttgacctcc

SEQ ID NO: 22043 - DNA, 26 bp, Homo sapiens
gggtacgaagtcaatcttgacctcca

SEQ ID NO: 22044 - DNA, 26 bp, Homo sapiens
ggtacgaagtcaatcttgacctccat

SEQ ID NO: 22045 - DNA, 26 bp, Homo sapiens
gtacgaagtcaatcttgacctccatg

SEQ ID NO: 22046 - DNA, 26 bp, Homo sapiens
tacgaagtcaatcttgacctccatga

SEQ ID NO: 22047 - DNA, 26 bp, Homo sapiens
acgaagtcaatcttgacctccatgaa

SEQ ID NO: 22048 - DNA, 26 bp, Homo sapiens
cgaagtcaatcttgacctccatgaag

SEQ ID NO: 22049 - DNA, 26 bp, Homo sapiens
gaagtcaatcttgacctccatgaagt

SEQ ID NO: 22050 - DNA, 26 bp, Homo sapiens
aagtcaatcttgacctccatgaagtg

SEQ ID NO: 22051 - DNA, 26 bp, Homo sapiens
agtcaatcttgacctccatgaagtgg

SEQ ID NO: 22052 - DNA, 26 bp, Homo sapiens
gtcaatcttgacctccatgaagtgga

SEQ ID NO: 22053 - DNA, 26 bp, Homo sapiens
tcaatcttgacctccatgaagtggag

SEQ ID NO: 22054 - DNA, 26 bp, Homo sapiens
caatcttgacctccatgaagtggagc

SEQ ID NO: 22055 - DNA, 26 bp, Homo sapiens
aatcttgacctccatgaagtggagct

SEQ ID NO: 22056 - DNA, 26 bp, Homo sapiens
atcttgacctccatgaagtggagctt

SEQ ID NO: 22057 - DNA, 26 bp, Homo sapiens
tcttgacctccatgaagtggagcttg

SEQ ID NO: 22058 - DNA, 26 bp, Homo sapiens
cttgacctccatgaagtggagcttgg

SEQ ID NO: 22059 - DNA, 26 bp, Homo sapiens
ttgacctccatgaagtggagcttggc

SEQ ID NO: 22060 - DNA, 26 bp, Homo sapiens
tgacctccatgaagtggagcttggct

SEQ ID NO: 22061 - DNA, 26 bp, Homo sapiens
gacctccatgaagtggagcttggctg

SEQ ID NO: 22062 - DNA, 26 bp, Homo sapiens
acctccatgaagtggagcttggctga

SEQ ID NO: 22063 - DNA, 26 bp, Homo sapiens
cctccatgaagtggagcttggctgac

SEQ ID NO: 22064 - DNA, 26 bp, Homo sapiens
ctccatgaagtggagcttggctgaca

SEQ ID NO: 22065 - DNA, 26 bp, Homo sapiens
tccatgaagtggagcttggctgacag

SEQ ID NO: 22066 - DNA, 26 bp, Homo sapiens
ccatgaagtggagcttggctgacagg

SEQ ID NO: 22067 - DNA, 26 bp, Homo sapiens
catgaagtggagcttggctgacaggt

SEQ ID NO: 22068 - DNA, 26 bp, Homo sapiens
atgaagtggagcttggctgacaggtt

SEQ ID NO: 22069 - DNA, 26 bp, Homo sapiens
tgaagtggagcttggctgacaggttg

SEQ ID NO: 22070 - DNA, 26 bp, Homo sapiens
gaagtggagcttggctgacaggttgc

SEQ ID NO: 22071 - DNA, 26 bp, Homo sapiens
aagtggagcttggctgacaggttgca

SEQ ID NO: 22072 - DNA, 26 bp, Homo sapiens
agtggagcttggctgacaggttgcag

SEQ ID NO: 22073 - DNA, 26 bp, Homo sapiens
gtggagcttggctgacaggttgcagg

SEQ ID NO: 22074 - DNA, 26 bp, Homo sapiens
tggagcttggctgacaggttgcaggc

SEQ ID NO: 22075 - DNA, 26 bp, Homo sapiens
ggagcttggctgacaggttgcaggcg

SEQ ID NO: 22076 - DNA, 26 bp, Homo sapiens
gagcttggctgacaggttgcaggcga

SEQ ID NO: 22077 - DNA, 26 bp, Homo sapiens
agcttggctgacaggttgcaggcgaa

SEQ ID NO: 22078 - DNA, 26 bp, Homo sapiens
gcttggctgacaggttgcaggcgaag

SEQ ID NO: 22079 - DNA, 26 bp, Homo sapiens
cttggctgacaggttgcaggcgaagc

SEQ ID NO: 22080 - DNA, 26 bp, Homo sapiens
ttggctgacaggttgcaggcgaagcc

SEQ ID NO: 22081 - DNA, 26 bp, Homo sapiens
tggctgacaggttgcaggcgaagccc

SEQ ID NO: 22082 - DNA, 26 bp, Homo sapiens
ggctgacaggttgcaggcgaagccct

SEQ ID NO: 22083 - DNA, 26 bp, Homo sapiens
gctgacaggttgcaggcgaagccctc

SEQ ID NO: 22084 - DNA, 26 bp, Homo sapiens
ctgacaggttgcaggcgaagccctcg

SEQ ID NO: 22085 - DNA, 26 bp, Homo sapiens
tgacaggttgcaggcgaagccctcgg

SEQ ID NO: 22086 - DNA, 26 bp, Homo sapiens
gacaggttgcaggcgaagccctcggg

SEQ ID NO: 22087 - DNA, 26 bp, Homo sapiens
acaggttgcaggcgaagccctcgggc

SEQ ID NO: 22088 - DNA, 26 bp, Homo sapiens
caggttgcaggcgaagccctcgggca

SEQ ID NO: 22089 - DNA, 26 bp, Homo sapiens
aggttgcaggcgaagccctcgggcac

SEQ ID NO: 22090 - DNA, 26 bp, Homo sapiens
ggttgcaggcgaagccctcgggcaca

SEQ ID NO: 22091 - DNA, 26 bp, Homo sapiens
gttgcaggcgaagccctcgggcacaa

SEQ ID NO: 22092 - DNA, 26 bp, Homo sapiens
ttgcaggcgaagccctcgggcacaaa

SEQ ID NO: 22093 - DNA, 26 bp, Homo sapiens
tgcaggcgaagccctcgggcacaaag

SEQ ID NO: 22094 - DNA, 26 bp, Homo sapiens
gcaggcgaagccctcgggcacaaagc

SEQ ID NO: 22095 - DNA, 26 bp, Homo sapiens
caggcgaagccctcgggcacaaagct

SEQ ID NO: 22096 - DNA, 26 bp, Homo sapiens
aggcgaagccctcgggcacaaagctg

SEQ ID NO: 22097 - DNA, 26 bp, Homo sapiens
ggcgaagccctcgggcacaaagctgt

SEQ ID NO: 22098 - DNA, 26 bp, Homo sapiens
gcgaagccctcgggcacaaagctgta

SEQ ID NO: 22099 - DNA, 26 bp, Homo sapiens
cgaagccctcgggcacaaagctgtag

SEQ ID NO: 22100 - DNA, 26 bp, Homo sapiens
gaagccctcgggcacaaagctgtagt

SEQ ID NO: 22101 - DNA, 26 bp, Homo sapiens
aagccctcgggcacaaagctgtagtc

SEQ ID NO: 22102 - DNA, 26 bp, Homo sapiens
agccctcgggcacaaagctgtagtca

SEQ ID NO: 22103 - DNA, 26 bp, Homo sapiens
gccctcgggcacaaagctgtagtcag

SEQ ID NO: 22104 - DNA, 26 bp, Homo sapiens
ccctcgggcacaaagctgtagtcagc

SEQ ID NO: 22105 - DNA, 26 bp, Homo sapiens
cctcgggcacaaagctgtagtcagcc

SEQ ID NO: 22106 - DNA, 26 bp, Homo sapiens
ctcgggcacaaagctgtagtcagcct

SEQ ID NO: 22107 - DNA, 26 bp, Homo sapiens
tcgggcacaaagctgtagtcagcctc

SEQ ID NO: 22108 - DNA, 26 bp, Homo sapiens
cgggcacaaagctgtagtcagcctcg

SEQ ID NO: 22109 - DNA, 26 bp, Homo sapiens
gggcacaaagctgtagtcagcctcgt

SEQ ID NO: 22110 - DNA, 26 bp, Homo sapiens
ggcacaaagctgtagtcagcctcgtc

SEQ ID NO: 22111 - DNA, 26 bp, Homo sapiens
gcacaaagctgtagtcagcctcgtcg

SEQ ID NO: 22112 - DNA, 26 bp, Homo sapiens
cacaaagctgtagtcagcctcgtcgg

SEQ ID NO: 22113 - DNA, 26 bp, Homo sapiens
acaaagctgtagtcagcctcgtcggc

SEQ ID NO: 22114 - DNA, 26 bp, Homo sapiens
caaagctgtagtcagcctcgtcggca

SEQ ID NO: 22115 - DNA, 26 bp, Homo sapiens
aaagctgtagtcagcctcgtcggcag

SEQ ID NO: 22116 - DNA, 26 bp, Homo sapiens
aagctgtagtcagcctcgtcggcagg

SEQ ID NO: 22117 - DNA, 26 bp, Homo sapiens
agctgtagtcagcctcgtcggcaggt

SEQ ID NO: 22118 - DNA, 26 bp, Homo sapiens
gctgtagtcagcctcgtcggcaggtg

SEQ ID NO: 22119 - DNA, 26 bp, Homo sapiens
ctgtagtcagcctcgtcggcaggtgt

SEQ ID NO: 22120 - DNA, 26 bp, Homo sapiens
tgtagtcagcctcgtcggcaggtgtg

SEQ ID NO: 22121 - DNA, 26 bp, Homo sapiens
gtagtcagcctcgtcggcaggtgtga

SEQ ID NO: 22122 - DNA, 26 bp, Homo sapiens
tagtcagcctcgtcggcaggtgtgac

SEQ ID NO: 22123 - DNA, 26 bp, Homo sapiens
agtcagcctcgtcggcaggtgtgacg

SEQ ID NO: 22124 - DNA, 26 bp, Homo sapiens
gtcagcctcgtcggcaggtgtgacgt

SEQ ID NO: 22125 - DNA, 26 bp, Homo sapiens
tcagcctcgtcggcaggtgtgacgtc

SEQ ID NO: 22126 - DNA, 26 bp, Homo sapiens
cagcctcgtcggcaggtgtgacgtcg

SEQ ID NO: 22127 - DNA, 26 bp, Homo sapiens
agcctcgtcggcaggtgtgacgtcgt

SEQ ID NO: 22128 - DNA, 26 bp, Homo sapiens
gcctcgtcggcaggtgtgacgtcgtc

SEQ ID NO: 22129 - DNA, 26 bp, Homo sapiens
cctcgtcggcaggtgtgacgtcgtca

SEQ ID NO: 22130 - DNA, 26 bp, Homo sapiens
ctcgtcggcaggtgtgacgtcgtcaa

SEQ ID NO: 22131 - DNA, 26 bp, Homo sapiens
tcgtcggcaggtgtgacgtcgtcaat

SEQ ID NO: 22132 - DNA, 26 bp, Homo sapiens
cgtcggcaggtgtgacgtcgtcaatg

SEQ ID NO: 22133 - DNA, 26 bp, Homo sapiens
gtcggcaggtgtgacgtcgtcaatgg

SEQ ID NO: 22134 - DNA, 26 bp, Homo sapiens
tcggcaggtgtgacgtcgtcaatggt

SEQ ID NO: 22135 - DNA, 26 bp, Homo sapiens
cggcaggtgtgacgtcgtcaatggtc

SEQ ID NO: 22136 - DNA, 26 bp, Homo sapiens
ggcaggtgtgacgtcgtcaatggtca

SEQ ID NO: 22137 - DNA, 26 bp, Homo sapiens
gcaggtgtgacgtcgtcaatggtcag

SEQ ID NO: 22138 - DNA, 26 bp, Homo sapiens
caggtgtgacgtcgtcaatggtcagt

SEQ ID NO: 22139 - DNA, 26 bp, Homo sapiens
aggtgtgacgtcgtcaatggtcagtt

SEQ ID NO: 22140 - DNA, 26 bp, Homo sapiens
ggtgtgacgtcgtcaatggtcagttt

SEQ ID NO: 22141 - DNA, 26 bp, Homo sapiens
gtgtgacgtcgtcaatggtcagtttg

SEQ ID NO: 22142 - DNA, 26 bp, Homo sapiens
tgtgacgtcgtcaatggtcagtttgt

SEQ ID NO: 22143 - DNA, 26 bp, Homo sapiens
gtgacgtcgtcaatggtcagtttgtg

SEQ ID NO: 22144 - DNA, 26 bp, Homo sapiens
tgacgtcgtcaatggtcagtttgtgg

SEQ ID NO: 22145 - DNA, 26 bp, Homo sapiens
gacgtcgtcaatggtcagtttgtgga

SEQ ID NO: 22146 - DNA, 26 bp, Homo sapiens
acgtcgtcaatggtcagtttgtggac

SEQ ID NO: 22147 - DNA, 26 bp, Homo sapiens
cgtcgtcaatggtcagtttgtggacc

SEQ ID NO: 22148 - DNA, 26 bp, Homo sapiens
gtcgtcaatggtcagtttgtggaccc

SEQ ID NO: 22149 - DNA, 26 bp, Homo sapiens
tcgtcaatggtcagtttgtggacccg

SEQ ID NO: 22150 - DNA, 26 bp, Homo sapiens
cgtcaatggtcagtttgtggacccgc

SEQ ID NO: 22151 - DNA, 26 bp, Homo sapiens
gtcaatggtcagtttgtggacccgcc

SEQ ID NO: 22152 - DNA, 26 bp, Homo sapiens
tcaatggtcagtttgtggacccgccc

SEQ ID NO: 22153 - DNA, 26 bp, Homo sapiens
caatggtcagtttgtggacccgcccg

SEQ ID NO: 22154 - DNA, 26 bp, Homo sapiens
aatggtcagtttgtggacccgcccga

SEQ ID NO: 22155 - DNA, 26 bp, Homo sapiens
atggtcagtttgtggacccgcccgat

SEQ ID NO: 22156 - DNA, 26 bp, Homo sapiens
tggtcagtttgtggacccgcccgatg

SEQ ID NO: 22157 - DNA, 26 bp, Homo sapiens
ggtcagtttgtggacccgcccgatgt

SEQ ID NO: 22158 - DNA, 26 bp, Homo sapiens
gtcagtttgtggacccgcccgatgtg

SEQ ID NO: 22159 - DNA, 26 bp, Homo sapiens
tcagtttgtggacccgcccgatgtgg

SEQ ID NO: 22160 - DNA, 26 bp, Homo sapiens
cagtttgtggacccgcccgatgtggg

SEQ ID NO: 22161 - DNA, 26 bp, Homo sapiens
agtttgtggacccgcccgatgtggga

SEQ ID NO: 22162 - DNA, 26 bp, Homo sapiens
gtttgtggacccgcccgatgtgggac

SEQ ID NO: 22163 - DNA, 26 bp, Homo sapiens
tttgtggacccgcccgatgtgggaca

SEQ ID NO: 22164 - DNA, 26 bp, Homo sapiens
ttgtggacccgcccgatgtgggacac

SEQ ID NO: 22165 - DNA, 26 bp, Homo sapiens
tgtggacccgcccgatgtgggacacc

SEQ ID NO: 22166 - DNA, 26 bp, Homo sapiens
gtggacccgcccgatgtgggacacct

SEQ ID NO: 22167 - DNA, 26 bp, Homo sapiens
tggacccgcccgatgtgggacacctt

SEQ ID NO: 22168 - DNA, 26 bp, Homo sapiens
ggacccgcccgatgtgggacaccttt

SEQ ID NO: 22169 - DNA, 26 bp, Homo sapiens
gacccgcccgatgtgggacaccttta

SEQ ID NO: 22170 - DNA, 26 bp, Homo sapiens
acccgcccgatgtgggacacctttat

SEQ ID NO: 22171 - DNA, 26 bp, Homo sapiens
cccgcccgatgtgggacacctttatg

SEQ ID NO: 22172 - DNA, 26 bp, Homo sapiens
ccgcccgatgtgggacacctttatgc

SEQ ID NO: 22173 - DNA, 26 bp, Homo sapiens
cgcccgatgtgggacacctttatgcg

SEQ ID NO: 22174 - DNA, 26 bp, Homo sapiens
gcccgatgtgggacacctttatgcgg

SEQ ID NO: 22175 - DNA, 26 bp, Homo sapiens
cccgatgtgggacacctttatgcggc

SEQ ID NO: 22176 - DNA, 26 bp, Homo sapiens
ccgatgtgggacacctttatgcggct

SEQ ID NO: 22177 - DNA, 26 bp, Homo sapiens
cgatgtgggacacctttatgcggctg

SEQ ID NO: 22178 - DNA, 26 bp, Homo sapiens
gatgtgggacacctttatgcggctgt

SEQ ID NO: 22179 - DNA, 26 bp, Homo sapiens
atgtgggacacctttatgcggctgtc

SEQ ID NO: 22180 - DNA, 26 bp, Homo sapiens
tgtgggacacctttatgcggctgtcg

SEQ ID NO: 22181 - DNA, 26 bp, Homo sapiens
gtgggacacctttatgcggctgtcgg

SEQ ID NO: 22182 - DNA, 26 bp, Homo sapiens
tgggacacctttatgcggctgtcggg

SEQ ID NO: 22183 - DNA, 26 bp, Homo sapiens
gggacacctttatgcggctgtcgggc

SEQ ID NO: 22184 - DNA, 26 bp, Homo sapiens
ggacacctttatgcggctgtcgggca

SEQ ID NO: 22185 - DNA, 26 bp, Homo sapiens
gacacctttatgcggctgtcgggcac

SEQ ID NO: 22186 - DNA, 26 bp, Homo sapiens
acacctttatgcggctgtcgggcacc

SEQ ID NO: 22187 - DNA, 26 bp, Homo sapiens
cacctttatgcggctgtcgggcacca

SEQ ID NO: 22188 - DNA, 26 bp, Homo sapiens
acctttatgcggctgtcgggcaccag

SEQ ID NO: 22189 - DNA, 26 bp, Homo sapiens
cctttatgcggctgtcgggcaccagc

SEQ ID NO: 22190 - DNA, 26 bp, Homo sapiens
ctttatgcggctgtcgggcaccagct

SEQ ID NO: 22191 - DNA, 26 bp, Homo sapiens
tttatgcggctgtcgggcaccagctc

SEQ ID NO: 22192 - DNA, 26 bp, Homo sapiens
ttatgcggctgtcgggcaccagctcc

SEQ ID NO: 22193 - DNA, 26 bp, Homo sapiens
tatgcggctgtcgggcaccagctcct

SEQ ID NO: 22194 - DNA, 26 bp, Homo sapiens
atgcggctgtcgggcaccagctcctt

SEQ ID NO: 22195 - DNA, 26 bp, Homo sapiens
tgcggctgtcgggcaccagctccttc

SEQ ID NO: 22196 - DNA, 26 bp, Homo sapiens
gcggctgtcgggcaccagctccttcc

SEQ ID NO: 22197 - DNA, 26 bp, Homo sapiens
cggctgtcgggcaccagctccttccc

SEQ ID NO: 22198 - DNA, 26 bp, Homo sapiens
ggctgtcgggcaccagctccttccca

SEQ ID NO: 22199 - DNA, 26 bp, Homo sapiens
gctgtcgggcaccagctccttcccat

SEQ ID NO: 22200 - DNA, 26 bp, Homo sapiens
ctgtcgggcaccagctccttcccatt

SEQ ID NO: 22201 - DNA, 26 bp, Homo sapiens
tgtcgggcaccagctccttcccattc

SEQ ID NO: 22202 - DNA, 26 bp, Homo sapiens
gtcgggcaccagctccttcccattct

SEQ ID NO: 22203 - DNA, 26 bp, Homo sapiens
tcgggcaccagctccttcccattctt

SEQ ID NO: 22204 - DNA, 26 bp, Homo sapiens
cgggcaccagctccttcccattcttc

SEQ ID NO: 22205 - DNA, 26 bp, Homo sapiens
gggcaccagctccttcccattcttca

SEQ ID NO: 22206 - DNA, 26 bp, Homo sapiens
ggcaccagctccttcccattcttcag

SEQ ID NO: 22207 - DNA, 26 bp, Homo sapiens
gcaccagctccttcccattcttcagc

SEQ ID NO: 22208 - DNA, 26 bp, Homo sapiens
caccagctccttcccattcttcagcc

SEQ ID NO: 22209 - DNA, 26 bp, Homo sapiens
accagctccttcccattcttcagcca

SEQ ID NO: 22210 - DNA, 26 bp, Homo sapiens
ccagctccttcccattcttcagccac

SEQ ID NO: 22211 - DNA, 26 bp, Homo sapiens
cagctccttcccattcttcagccaca

SEQ ID NO: 22212 - DNA, 26 bp, Homo sapiens
agctccttcccattcttcagccacac

SEQ ID NO: 22213 - DNA, 26 bp, Homo sapiens
gctccttcccattcttcagccacaca

SEQ ID NO: 22214 - DNA, 26 bp, Homo sapiens
ctccttcccattcttcagccacacac

SEQ ID NO: 22215 - DNA, 26 bp, Homo sapiens
tccttcccattcttcagccacacacc

SEQ ID NO: 22216 - DNA, 26 bp, Homo sapiens
ccttcccattcttcagccacacaccc

SEQ ID NO: 22217 - DNA, 26 bp, Homo sapiens
cttcccattcttcagccacacacccc

SEQ ID NO: 22218 - DNA, 26 bp, Homo sapiens
ttcccattcttcagccacacaccccg

SEQ ID NO: 22219 - DNA, 26 bp, Homo sapiens
tcccattcttcagccacacaccccga

SEQ ID NO: 22220 - DNA, 26 bp, Homo sapiens
cccattcttcagccacacaccccgaa

SEQ ID NO: 22221 - DNA, 26 bp, Homo sapiens
ccattcttcagccacacaccccgaac

SEQ ID NO: 22222 - DNA, 26 bp, Homo sapiens
cattcttcagccacacaccccgaaca

SEQ ID NO: 22223 - DNA, 26 bp, Homo sapiens
attcttcagccacacaccccgaacat

SEQ ID NO: 22224 - DNA, 26 bp, Homo sapiens
ttcttcagccacacaccccgaacatt

SEQ ID NO: 22225 - DNA, 26 bp, Homo sapiens
tcttcagccacacaccccgaacattc

SEQ ID NO: 22226 - DNA, 26 bp, Homo sapiens
cttcagccacacaccccgaacattct

SEQ ID NO: 22227 - DNA, 26 bp, Homo sapiens
ttcagccacacaccccgaacattctc

SEQ ID NO: 22228 - DNA, 26 bp, Homo sapiens
tcagccacacaccccgaacattctca

SEQ ID NO: 22229 - DNA, 26 bp, Homo sapiens
cagccacacaccccgaacattctcat

SEQ ID NO: 22230 - DNA, 26 bp, Homo sapiens
agccacacaccccgaacattctcatc

SEQ ID NO: 22231 - DNA, 26 bp, Homo sapiens
gccacacaccccgaacattctcatct

SEQ ID NO: 22232 - DNA, 26 bp, Homo sapiens
ccacacaccccgaacattctcatctg

SEQ ID NO: 22233 - DNA, 26 bp, Homo sapiens
cacacaccccgaacattctcatctga

SEQ ID NO: 22234 - DNA, 26 bp, Homo sapiens
acacaccccgaacattctcatctgag

SEQ ID NO: 22235 - DNA, 26 bp, Homo sapiens
cacaccccgaacattctcatctgaga

SEQ ID NO: 22236 - DNA, 26 bp, Homo sapiens
acaccccgaacattctcatctgagac

SEQ ID NO: 22237 - DNA, 26 bp, Homo sapiens
caccccgaacattctcatctgagacc

SEQ ID NO: 22238 - DNA, 26 bp, Homo sapiens
accccgaacattctcatctgagacct

SEQ ID NO: 22239 - DNA, 26 bp, Homo sapiens
ccccgaacattctcatctgagacctc

SEQ ID NO: 22240 - DNA, 26 bp, Homo sapiens
cccgaacattctcatctgagacctca

SEQ ID NO: 22241 - DNA, 26 bp, Homo sapiens
ccgaacattctcatctgagacctcac

SEQ ID NO: 22242 - DNA, 26 bp, Homo sapiens
cgaacattctcatctgagacctcaca

SEQ ID NO: 22243 - DNA, 26 bp, Homo sapiens
gaacattctcatctgagacctcacat

SEQ ID NO: 22244 - DNA, 26 bp, Homo sapiens
aacattctcatctgagacctcacatt

SEQ ID NO: 22245 - DNA, 26 bp, Homo sapiens
acattctcatctgagacctcacattt

SEQ ID NO: 22246 - DNA, 26 bp, Homo sapiens
cattctcatctgagacctcacatttg

SEQ ID NO: 22247 - DNA, 26 bp, Homo sapiens
attctcatctgagacctcacatttga

SEQ ID NO: 22248 - DNA, 26 bp, Homo sapiens
ttctcatctgagacctcacatttgaa

SEQ ID NO: 22249 - DNA, 26 bp, Homo sapiens
tctcatctgagacctcacatttgaac

SEQ ID NO: 22250 - DNA, 26 bp, Homo sapiens
ctcatctgagacctcacatttgaaca

SEQ ID NO: 22251 - DNA, 26 bp, Homo sapiens
tcatctgagacctcacatttgaacac

SEQ ID NO: 22252 - DNA, 26 bp, Homo sapiens
catctgagacctcacatttgaacacc

SEQ ID NO: 22253 - DNA, 26 bp, Homo sapiens
atctgagacctcacatttgaacaccg

SEQ ID NO: 22254 - DNA, 26 bp, Homo sapiens
tctgagacctcacatttgaacaccgc

SEQ ID NO: 22255 - DNA, 26 bp, Homo sapiens
ctgagacctcacatttgaacaccgcc

SEQ ID NO: 22256 - DNA, 26 bp, Homo sapiens
tgagacctcacatttgaacaccgcct

SEQ ID NO: 22257 - DNA, 26 bp, Homo sapiens
gagacctcacatttgaacaccgcctg

SEQ ID NO: 22258 - DNA, 26 bp, Homo sapiens
agacctcacatttgaacaccgcctgg

SEQ ID NO: 22259 - DNA, 26 bp, Homo sapiens
gacctcacatttgaacaccgcctggt

SEQ ID NO: 22260 - DNA, 26 bp, Homo sapiens
acctcacatttgaacaccgcctggtc

SEQ ID NO: 22261 - DNA, 26 bp, Homo sapiens
cctcacatttgaacaccgcctggtcc

SEQ ID NO: 22262 - DNA, 26 bp, Homo sapiens
ctcacatttgaacaccgcctggtcct

SEQ ID NO: 22263 - DNA, 26 bp, Homo sapiens
tcacatttgaacaccgcctggtcctt

SEQ ID NO: 22264 - DNA, 26 bp, Homo sapiens
cacatttgaacaccgcctggtccttt

SEQ ID NO: 22265 - DNA, 26 bp, Homo sapiens
acatttgaacaccgcctggtcctttg

SEQ ID NO: 22266 - DNA, 26 bp, Homo sapiens
catttgaacaccgcctggtcctttgc

SEQ ID NO: 22267 - DNA, 26 bp, Homo sapiens
atttgaacaccgcctggtcctttgcg

SEQ ID NO: 22268 - DNA, 26 bp, Homo sapiens
tttgaacaccgcctggtcctttgcgc

SEQ ID NO: 22269 - DNA, 26 bp, Homo sapiens
ttgaacaccgcctggtcctttgcgcc

SEQ ID NO: 22270 - DNA, 26 bp, Homo sapiens
tgaacaccgcctggtcctttgcgccc

SEQ ID NO: 22271 - DNA, 26 bp, Homo sapiens
gaacaccgcctggtcctttgcgccca

SEQ ID NO: 22272 - DNA, 26 bp, Homo sapiens
aacaccgcctggtcctttgcgcccac

SEQ ID NO: 22273 - DNA, 26 bp, Homo sapiens
acaccgcctggtcctttgcgcccacc

SEQ ID NO: 22274 - DNA, 26 bp, Homo sapiens
caccgcctggtcctttgcgcccacca

SEQ ID NO: 22275 - DNA, 26 bp, Homo sapiens
accgcctggtcctttgcgcccaccat

SEQ ID NO: 22276 - DNA, 26 bp, Homo sapiens
ccgcctggtcctttgcgcccaccatc

SEQ ID NO: 22277 - DNA, 26 bp, Homo sapiens
cgcctggtcctttgcgcccaccatca

SEQ ID NO: 22278 - DNA, 26 bp, Homo sapiens
gcctggtcctttgcgcccaccatcag

SEQ ID NO: 22279 - DNA, 26 bp, Homo sapiens
cctggtcctttgcgcccaccatcagg

SEQ ID NO: 22280 - DNA, 26 bp, Homo sapiens
ctggtcctttgcgcccaccatcaggt

SEQ ID NO: 22281 - DNA, 26 bp, Homo sapiens
tggtcctttgcgcccaccatcaggtc

SEQ ID NO: 22282 - DNA, 26 bp, Homo sapiens
ggtcctttgcgcccaccatcaggtct

SEQ ID NO: 22283 - DNA, 26 bp, Homo sapiens
gtcctttgcgcccaccatcaggtctg

SEQ ID NO: 22284 - DNA, 26 bp, Homo sapiens
tcctttgcgcccaccatcaggtctgc

SEQ ID NO: 22285 - DNA, 26 bp, Homo sapiens
cctttgcgcccaccatcaggtctgcg

SEQ ID NO: 22286 - DNA, 26 bp, Homo sapiens
ctttgcgcccaccatcaggtctgcga

SEQ ID NO: 22287 - DNA, 26 bp, Homo sapiens
tttgcgcccaccatcaggtctgcgat

SEQ ID NO: 22288 - DNA, 26 bp, Homo sapiens
ttgcgcccaccatcaggtctgcgatg

SEQ ID NO: 22289 - DNA, 26 bp, Homo sapiens
tgcgcccaccatcaggtctgcgatgc

SEQ ID NO: 22290 - DNA, 26 bp, Homo sapiens
gcgcccaccatcaggtctgcgatgct

SEQ ID NO: 22291 - DNA, 26 bp, Homo sapiens
cgcccaccatcaggtctgcgatgctc

SEQ ID NO: 22292 - DNA, 26 bp, Homo sapiens
gcccaccatcaggtctgcgatgctct

SEQ ID NO: 22293 - DNA, 26 bp, Homo sapiens
cccaccatcaggtctgcgatgctctg

SEQ ID NO: 22294 - DNA, 26 bp, Homo sapiens
ccaccatcaggtctgcgatgctctgg

SEQ ID NO: 22295 - DNA, 26 bp, Homo sapiens
caccatcaggtctgcgatgctctggt

SEQ ID NO: 22296 - DNA, 26 bp, Homo sapiens
accatcaggtctgcgatgctctggta

SEQ ID NO: 22297 - DNA, 26 bp, Homo sapiens
ccatcaggtctgcgatgctctggtac

SEQ ID NO: 22298 - DNA, 26 bp, Homo sapiens
catcaggtctgcgatgctctggtaca

SEQ ID NO: 22299 - DNA, 26 bp, Homo sapiens
atcaggtctgcgatgctctggtacac

SEQ ID NO: 22300 - DNA, 26 bp, Homo sapiens
tcaggtctgcgatgctctggtacacc

SEQ ID NO: 22301 - DNA, 26 bp, Homo sapiens
caggtctgcgatgctctggtacacct

SEQ ID NO: 22302 - DNA, 26 bp, Homo sapiens
aggtctgcgatgctctggtacacctc

SEQ ID NO: 22303 - DNA, 26 bp, Homo sapiens
ggtctgcgatgctctggtacacctcc

SEQ ID NO: 22304 - DNA, 26 bp, Homo sapiens
gtctgcgatgctctggtacacctcca

SEQ ID NO: 22305 - DNA, 26 bp, Homo sapiens
tctgcgatgctctggtacacctccag

SEQ ID NO: 22306 - DNA, 26 bp, Homo sapiens
ctgcgatgctctggtacacctccagc

SEQ ID NO: 22307 - DNA, 26 bp, Homo sapiens
tgcgatgctctggtacacctccagct

SEQ ID NO: 22308 - DNA, 26 bp, Homo sapiens
gcgatgctctggtacacctccagctt

SEQ ID NO: 22309 - DNA, 26 bp, Homo sapiens
cgatgctctggtacacctccagcttc

SEQ ID NO: 22310 - DNA, 26 bp, Homo sapiens
gatgctctggtacacctccagcttct

SEQ ID NO: 22311 - DNA, 26 bp, Homo sapiens
atgctctggtacacctccagcttctt

SEQ ID NO: 22312 - DNA, 26 bp, Homo sapiens
tgctctggtacacctccagcttcttt

SEQ ID NO: 22313 - DNA, 26 bp, Homo sapiens
gctctggtacacctccagcttctttt

SEQ ID NO: 22314 - DNA, 26 bp, Homo sapiens
ctctggtacacctccagcttcttttc

SEQ ID NO: 22315 - DNA, 26 bp, Homo sapiens
tctggtacacctccagcttcttttcc

SEQ ID NO: 22316 - DNA, 26 bp, Homo sapiens
ctggtacacctccagcttcttttcct

SEQ ID NO: 22317 - DNA, 26 bp, Homo sapiens
tggtacacctccagcttcttttcctg

SEQ ID NO: 22318 - DNA, 26 bp, Homo sapiens
ggtacacctccagcttcttttcctgc

SEQ ID NO: 22319 - DNA, 26 bp, Homo sapiens
gtacacctccagcttcttttcctgca

SEQ ID NO: 22320 - DNA, 26 bp, Homo sapiens
tacacctccagcttcttttcctgcac

SEQ ID NO: 22321 - DNA, 26 bp, Homo sapiens
acacctccagcttcttttcctgcaca

SEQ ID NO: 22322 - DNA, 26 bp, Homo sapiens
cacctccagcttcttttcctgcacaa

SEQ ID NO: 22323 - DNA, 26 bp, Homo sapiens
acctccagcttcttttcctgcacaat

SEQ ID NO: 22324 - DNA, 26 bp, Homo sapiens
cctccagcttcttttcctgcacaatg

SEQ ID NO: 22325 - DNA, 26 bp, Homo sapiens
ctccagcttcttttcctgcacaatga

SEQ ID NO: 22326 - DNA, 26 bp, Homo sapiens
tccagcttcttttcctgcacaatgag

SEQ ID NO: 22327 - DNA, 26 bp, Homo sapiens
ccagcttcttttcctgcacaatgagc

SEQ ID NO: 22328 - DNA, 26 bp, Homo sapiens
cagcttcttttcctgcacaatgagct

SEQ ID NO: 22329 - DNA, 26 bp, Homo sapiens
agcttcttttcctgcacaatgagctc

SEQ ID NO: 22330 - DNA, 26 bp, Homo sapiens
gcttcttttcctgcacaatgagctca

SEQ ID NO: 22331 - DNA, 26 bp, Homo sapiens
cttcttttcctgcacaatgagctcag

SEQ ID NO: 22332 - DNA, 26 bp, Homo sapiens
ttcttttcctgcacaatgagctcagc

SEQ ID NO: 22333 - DNA, 26 bp, Homo sapiens
tcttttcctgcacaatgagctcagcc

SEQ ID NO: 22334 - DNA, 26 bp, Homo sapiens
cttttcctgcacaatgagctcagcca

SEQ ID NO: 22335 - DNA, 26 bp, Homo sapiens
ttttcctgcacaatgagctcagccag

SEQ ID NO: 22336 - DNA, 26 bp, Homo sapiens
tttcctgcacaatgagctcagccagc

SEQ ID NO: 22337 - DNA, 26 bp, Homo sapiens
ttcctgcacaatgagctcagccagcg

SEQ ID NO: 22338 - DNA, 26 bp, Homo sapiens
tcctgcacaatgagctcagccagcgc

SEQ ID NO: 22339 - DNA, 26 bp, Homo sapiens
cctgcacaatgagctcagccagcgcc

SEQ ID NO: 22340 - DNA, 26 bp, Homo sapiens
ctgcacaatgagctcagccagcgcct

SEQ ID NO: 22341 - DNA, 26 bp, Homo sapiens
tgcacaatgagctcagccagcgcctg

SEQ ID NO: 22342 - DNA, 26 bp, Homo sapiens
gcacaatgagctcagccagcgcctgg

SEQ ID NO: 22343 - DNA, 26 bp, Homo sapiens
cacaatgagctcagccagcgcctggc

SEQ ID NO: 22344 - DNA, 26 bp, Homo sapiens
acaatgagctcagccagcgcctggcc

SEQ ID NO: 22345 - DNA, 26 bp, Homo sapiens
caatgagctcagccagcgcctggccc

SEQ ID NO: 22346 - DNA, 26 bp, Homo sapiens
aatgagctcagccagcgcctggcccc

SEQ ID NO: 22347 - DNA, 26 bp, Homo sapiens
atgagctcagccagcgcctggccccc

SEQ ID NO: 22348 - DNA, 26 bp, Homo sapiens
tgagctcagccagcgcctggcccccg

SEQ ID NO: 22349 - DNA, 26 bp, Homo sapiens
gagctcagccagcgcctggcccccgc

SEQ ID NO: 22350 - DNA, 26 bp, Homo sapiens
agctcagccagcgcctggcccccgct

SEQ ID NO: 22351 - DNA, 26 bp, Homo sapiens
gctcagccagcgcctggcccccgcta

SEQ ID NO: 22352 - DNA, 26 bp, Homo sapiens
ctcagccagcgcctggcccccgctag

SEQ ID NO: 22353 - DNA, 26 bp, Homo sapiens
tcagccagcgcctggcccccgctagt

SEQ ID NO: 22354 - DNA, 26 bp, Homo sapiens
cagccagcgcctggcccccgctagtg

SEQ ID NO: 22355 - DNA, 26 bp, Homo sapiens
agccagcgcctggcccccgctagtgc

SEQ ID NO: 22356 - DNA, 26 bp, Homo sapiens
gccagcgcctggcccccgctagtgca

SEQ ID NO: 22357 - DNA, 26 bp, Homo sapiens
ccagcgcctggcccccgctagtgcac

SEQ ID NO: 22358 - DNA, 26 bp, Homo sapiens
cagcgcctggcccccgctagtgcaca

SEQ ID NO: 22359 - DNA, 26 bp, Homo sapiens
agcgcctggcccccgctagtgcacag

SEQ ID NO: 22360 - DNA, 26 bp, Homo sapiens
gcgcctggcccccgctagtgcacagt

SEQ ID NO: 22361 - DNA, 26 bp, Homo sapiens
cgcctggcccccgctagtgcacagtg

SEQ ID NO: 22362 - DNA, 26 bp, Homo sapiens
gcctggcccccgctagtgcacagtgc

SEQ ID NO: 22363 - DNA, 26 bp, Homo sapiens
cctggcccccgctagtgcacagtgca

SEQ ID NO: 22364 - DNA, 26 bp, Homo sapiens
ctggcccccgctagtgcacagtgcat

SEQ ID NO: 22365 - DNA, 26 bp, Homo sapiens
tggcccccgctagtgcacagtgcata

SEQ ID NO: 22366 - DNA, 26 bp, Homo sapiens
ggcccccgctagtgcacagtgcatag

SEQ ID NO: 22367 - DNA, 26 bp, Homo sapiens
gcccccgctagtgcacagtgcatagt

SEQ ID NO: 22368 - DNA, 26 bp, Homo sapiens
cccccgctagtgcacagtgcatagtg

SEQ ID NO: 22369 - DNA, 26 bp, Homo sapiens
ccccgctagtgcacagtgcatagtgc

SEQ ID NO: 22370 - DNA, 26 bp, Homo sapiens
cccgctagtgcacagtgcatagtgcc

SEQ ID NO: 22371 - DNA, 26 bp, Homo sapiens
ccgctagtgcacagtgcatagtgccc

SEQ ID NO: 22372 - DNA, 26 bp, Homo sapiens
cgctagtgcacagtgcatagtgcccc

SEQ ID NO: 22373 - DNA, 26 bp, Homo sapiens
gctagtgcacagtgcatagtgccccg

SEQ ID NO: 22374 - DNA, 26 bp, Homo sapiens
ctagtgcacagtgcatagtgccccgc

SEQ ID NO: 22375 - DNA, 26 bp, Homo sapiens
tagtgcacagtgcatagtgccccgcg

SEQ ID NO: 22376 - DNA, 26 bp, Homo sapiens
agtgcacagtgcatagtgccccgcgt

SEQ ID NO: 22377 - DNA, 26 bp, Homo sapiens
gtgcacagtgcatagtgccccgcgtc

SEQ ID NO: 22378 - DNA, 26 bp, Homo sapiens
tgcacagtgcatagtgccccgcgtcc

SEQ ID NO: 22379 - DNA, 26 bp, Homo sapiens
gcacagtgcatagtgccccgcgtcct

SEQ ID NO: 22380 - DNA, 26 bp, Homo sapiens
cacagtgcatagtgccccgcgtcctc

SEQ ID NO: 22381 - DNA, 26 bp, Homo sapiens
acagtgcatagtgccccgcgtcctcc

SEQ ID NO: 22382 - DNA, 26 bp, Homo sapiens
cagtgcatagtgccccgcgtcctcca

SEQ ID NO: 22383 - DNA, 26 bp, Homo sapiens
agtgcatagtgccccgcgtcctccag

SEQ ID NO: 22384 - DNA, 26 bp, Homo sapiens
gtgcatagtgccccgcgtcctccagc

SEQ ID NO: 22385 - DNA, 26 bp, Homo sapiens
tgcatagtgccccgcgtcctccagca

SEQ ID NO: 22386 - DNA, 26 bp, Homo sapiens
gcatagtgccccgcgtcctccagcat

SEQ ID NO: 22387 - DNA, 26 bp, Homo sapiens
catagtgccccgcgtcctccagcatg

SEQ ID NO: 22388 - DNA, 26 bp, Homo sapiens
atagtgccccgcgtcctccagcatgg

SEQ ID NO: 22389 - DNA, 26 bp, Homo sapiens
tagtgccccgcgtcctccagcatggc

SEQ ID NO: 22390 - DNA, 26 bp, Homo sapiens
agtgccccgcgtcctccagcatggcc

SEQ ID NO: 22391 - DNA, 26 bp, Homo sapiens
gtgccccgcgtcctccagcatggcct

SEQ ID NO: 22392 - DNA, 26 bp, Homo sapiens
tgccccgcgtcctccagcatggcctc

SEQ ID NO: 22393 - DNA, 26 bp, Homo sapiens
gccccgcgtcctccagcatggcctcg

SEQ ID NO: 22394 - DNA, 26 bp, Homo sapiens
ccccgcgtcctccagcatggcctcgt

SEQ ID NO: 22395 - DNA, 26 bp, Homo sapiens
cccgcgtcctccagcatggcctcgtt

SEQ ID NO: 22396 - DNA, 26 bp, Homo sapiens
ccgcgtcctccagcatggcctcgttg

SEQ ID NO: 22397 - DNA, 26 bp, Homo sapiens
cgcgtcctccagcatggcctcgttga

SEQ ID NO: 22398 - DNA, 26 bp, Homo sapiens
gcgtcctccagcatggcctcgttgat

SEQ ID NO: 22399 - DNA, 26 bp, Homo sapiens
cgtcctccagcatggcctcgttgatg

SEQ ID NO: 22400 - DNA, 26 bp, Homo sapiens
gtcctccagcatggcctcgttgatga

SEQ ID NO: 22401 - DNA, 26 bp, Homo sapiens
tcctccagcatggcctcgttgatgat

SEQ ID NO: 22402 - DNA, 26 bp, Homo sapiens
cctccagcatggcctcgttgatgatc

SEQ ID NO: 22403 - DNA, 26 bp, Homo sapiens
ctccagcatggcctcgttgatgatca

SEQ ID NO: 22404 - DNA, 26 bp, Homo sapiens
tccagcatggcctcgttgatgatcag

SEQ ID NO: 22405 - DNA, 26 bp, Homo sapiens
ccagcatggcctcgttgatgatcagg

SEQ ID NO: 22406 - DNA, 26 bp, Homo sapiens
cagcatggcctcgttgatgatcaggt

SEQ ID NO: 22407 - DNA, 26 bp, Homo sapiens
agcatggcctcgttgatgatcaggtg

SEQ ID NO: 22408 - DNA, 26 bp, Homo sapiens
gcatggcctcgttgatgatcaggtgg

SEQ ID NO: 22409 - DNA, 26 bp, Homo sapiens
catggcctcgttgatgatcaggtggt

SEQ ID NO: 22410 - DNA, 26 bp, Homo sapiens
atggcctcgttgatgatcaggtggtg

SEQ ID NO: 22411 - DNA, 26 bp, Homo sapiens
tggcctcgttgatgatcaggtggtgt

SEQ ID NO: 22412 - DNA, 26 bp, Homo sapiens
ggcctcgttgatgatcaggtggtgtc

SEQ ID NO: 22413 - DNA, 26 bp, Homo sapiens
gcctcgttgatgatcaggtggtgtct

SEQ ID NO: 22414 - DNA, 26 bp, Homo sapiens
cctcgttgatgatcaggtggtgtctc

SEQ ID NO: 22415 - DNA, 26 bp, Homo sapiens
ctcgttgatgatcaggtggtgtctct

SEQ ID NO: 22416 - DNA, 26 bp, Homo sapiens
tcgttgatgatcaggtggtgtctctg

SEQ ID NO: 22417 - DNA, 26 bp, Homo sapiens
cgttgatgatcaggtggtgtctctgc

SEQ ID NO: 22418 - DNA, 26 bp, Homo sapiens
gttgatgatcaggtggtgtctctgcc

SEQ ID NO: 22419 - DNA, 26 bp, Homo sapiens
ttgatgatcaggtggtgtctctgccc

SEQ ID NO: 22420 - DNA, 26 bp, Homo sapiens
tgatgatcaggtggtgtctctgcccg

SEQ ID NO: 22421 - DNA, 26 bp, Homo sapiens
gatgatcaggtggtgtctctgcccgt

SEQ ID NO: 22422 - DNA, 26 bp, Homo sapiens
atgatcaggtggtgtctctgcccgtc

SEQ ID NO: 22423 - DNA, 26 bp, Homo sapiens
tgatcaggtggtgtctctgcccgtcc

SEQ ID NO: 22424 - DNA, 26 bp, Homo sapiens
gatcaggtggtgtctctgcccgtcct

SEQ ID NO: 22425 - DNA, 26 bp, Homo sapiens
atcaggtggtgtctctgcccgtcctt

SEQ ID NO: 22426 - DNA, 26 bp, Homo sapiens
tcaggtggtgtctctgcccgtccttc

SEQ ID NO: 22427 - DNA, 26 bp, Homo sapiens
caggtggtgtctctgcccgtccttct

SEQ ID NO: 22428 - DNA, 26 bp, Homo sapiens
aggtggtgtctctgcccgtccttctt

SEQ ID NO: 22429 - DNA, 26 bp, Homo sapiens
ggtggtgtctctgcccgtccttcttg

SEQ ID NO: 22430 - DNA, 26 bp, Homo sapiens
gtggtgtctctgcccgtccttcttga

SEQ ID NO: 22431 - DNA, 26 bp, Homo sapiens
tggtgtctctgcccgtccttcttgaa

SEQ ID NO: 22432 - DNA, 26 bp, Homo sapiens
ggtgtctctgcccgtccttcttgaac

SEQ ID NO: 22433 - DNA, 26 bp, Homo sapiens
gtgtctctgcccgtccttcttgaacc

SEQ ID NO: 22434 - DNA, 26 bp, Homo sapiens
tgtctctgcccgtccttcttgaaccg

SEQ ID NO: 22435 - DNA, 26 bp, Homo sapiens
gtctctgcccgtccttcttgaaccgg

SEQ ID NO: 22436 - DNA, 26 bp, Homo sapiens
tctctgcccgtccttcttgaaccggt

SEQ ID NO: 22437 - DNA, 26 bp, Homo sapiens
ctctgcccgtccttcttgaaccggta

SEQ ID NO: 22438 - DNA, 26 bp, Homo sapiens
tctgcccgtccttcttgaaccggtat

SEQ ID NO: 22439 - DNA, 26 bp, Homo sapiens
ctgcccgtccttcttgaaccggtatt

SEQ ID NO: 22440 - DNA, 26 bp, Homo sapiens
tgcccgtccttcttgaaccggtattt

SEQ ID NO: 22441 - DNA, 26 bp, Homo sapiens
gcccgtccttcttgaaccggtatttg

SEQ ID NO: 22442 - DNA, 26 bp, Homo sapiens
cccgtccttcttgaaccggtatttga

SEQ ID NO: 22443 - DNA, 26 bp, Homo sapiens
ccgtccttcttgaaccggtatttgaa

SEQ ID NO: 22444 - DNA, 26 bp, Homo sapiens
cgtccttcttgaaccggtatttgaag

SEQ ID NO: 22445 - DNA, 26 bp, Homo sapiens
gtccttcttgaaccggtatttgaagg

SEQ ID NO: 22446 - DNA, 26 bp, Homo sapiens
tccttcttgaaccggtatttgaaggt

SEQ ID NO: 22447 - DNA, 26 bp, Homo sapiens
ccttcttgaaccggtatttgaaggtc

SEQ ID NO: 22448 - DNA, 26 bp, Homo sapiens
cttcttgaaccggtatttgaaggtct

SEQ ID NO: 22449 - DNA, 26 bp, Homo sapiens
ttcttgaaccggtatttgaaggtctc

SEQ ID NO: 22450 - DNA, 26 bp, Homo sapiens
tcttgaaccggtatttgaaggtctcc

SEQ ID NO: 22451 - DNA, 26 bp, Homo sapiens
cttgaaccggtatttgaaggtctcct

SEQ ID NO: 22452 - DNA, 26 bp, Homo sapiens
ttgaaccggtatttgaaggtctcctc

SEQ ID NO: 22453 - DNA, 26 bp, Homo sapiens
tgaaccggtatttgaaggtctcctcc

SEQ ID NO: 22454 - DNA, 26 bp, Homo sapiens
gaaccggtatttgaaggtctcctccc

SEQ ID NO: 22455 - DNA, 26 bp, Homo sapiens
aaccggtatttgaaggtctcctcccg

SEQ ID NO: 22456 - DNA, 26 bp, Homo sapiens
accggtatttgaaggtctcctcccgg

SEQ ID NO: 22457 - DNA, 26 bp, Homo sapiens
ccggtatttgaaggtctcctcccggg

SEQ ID NO: 22458 - DNA, 26 bp, Homo sapiens
cggtatttgaaggtctcctcccgggt

SEQ ID NO: 22459 - DNA, 26 bp, Homo sapiens
ggtatttgaaggtctcctcccgggtc

SEQ ID NO: 22460 - DNA, 26 bp, Homo sapiens
gtatttgaaggtctcctcccgggtca

SEQ ID NO: 22461 - DNA, 26 bp, Homo sapiens
tatttgaaggtctcctcccgggtcag

SEQ ID NO: 22462 - DNA, 26 bp, Homo sapiens
atttgaaggtctcctcccgggtcagc

SEQ ID NO: 22463 - DNA, 26 bp, Homo sapiens
tttgaaggtctcctcccgggtcagct

SEQ ID NO: 22464 - DNA, 26 bp, Homo sapiens
ttgaaggtctcctcccgggtcagctc

SEQ ID NO: 22465 - DNA, 26 bp, Homo sapiens
tgaaggtctcctcccgggtcagctcc

SEQ ID NO: 22466 - DNA, 26 bp, Homo sapiens
gaaggtctcctcccgggtcagctcca

SEQ ID NO: 22467 - DNA, 26 bp, Homo sapiens
aaggtctcctcccgggtcagctccac

SEQ ID NO: 22468 - DNA, 26 bp, Homo sapiens
aggtctcctcccgggtcagctccacc

SEQ ID NO: 22469 - DNA, 26 bp, Homo sapiens
ggtctcctcccgggtcagctccaccc

SEQ ID NO: 22470 - DNA, 26 bp, Homo sapiens
gtctcctcccgggtcagctccacccc

SEQ ID NO: 22471 - DNA, 26 bp, Homo sapiens
tctcctcccgggtcagctccaccccg

SEQ ID NO: 22472 - DNA, 26 bp, Homo sapiens
ctcctcccgggtcagctccaccccgt

SEQ ID NO: 22473 - DNA, 26 bp, Homo sapiens
tcctcccgggtcagctccaccccgtc

SEQ ID NO: 22474 - DNA, 26 bp, Homo sapiens
cctcccgggtcagctccaccccgtcc

SEQ ID NO: 22475 - DNA, 26 bp, Homo sapiens
ctcccgggtcagctccaccccgtcct

SEQ ID NO: 22476 - DNA, 26 bp, Homo sapiens
tcccgggtcagctccaccccgtcctt

SEQ ID NO: 22477 - DNA, 26 bp, Homo sapiens
cccgggtcagctccaccccgtccttc

SEQ ID NO: 22478 - DNA, 26 bp, Homo sapiens
ccgggtcagctccaccccgtccttca

SEQ ID NO: 22479 - DNA, 26 bp, Homo sapiens
cgggtcagctccaccccgtccttcag

SEQ ID NO: 22480 - DNA, 26 bp, Homo sapiens
gggtcagctccaccccgtccttcagc

SEQ ID NO: 22481 - DNA, 26 bp, Homo sapiens
ggtcagctccaccccgtccttcagcc

SEQ ID NO: 22482 - DNA, 26 bp, Homo sapiens
gtcagctccaccccgtccttcagcca

SEQ ID NO: 22483 - DNA, 26 bp, Homo sapiens
tcagctccaccccgtccttcagccat

SEQ ID NO: 22484 - DNA, 26 bp, Homo sapiens
cagctccaccccgtccttcagccatt

SEQ ID NO: 22485 - DNA, 26 bp, Homo sapiens
agctccaccccgtccttcagccattt

SEQ ID NO: 22486 - DNA, 26 bp, Homo sapiens
gctccaccccgtccttcagccatttg

SEQ ID NO: 22487 - DNA, 26 bp, Homo sapiens
ctccaccccgtccttcagccatttga

SEQ ID NO: 22488 - DNA, 26 bp, Homo sapiens
tccaccccgtccttcagccatttgac

SEQ ID NO: 22489 - DNA, 26 bp, Homo sapiens
ccaccccgtccttcagccatttgact

SEQ ID NO: 22490 - DNA, 26 bp, Homo sapiens
caccccgtccttcagccatttgactt

SEQ ID NO: 22491 - DNA, 26 bp, Homo sapiens
accccgtccttcagccatttgacttg

SEQ ID NO: 22492 - DNA, 26 bp, Homo sapiens
ccccgtccttcagccatttgacttgc

SEQ ID NO: 22493 - DNA, 26 bp, Homo sapiens
cccgtccttcagccatttgacttgcg

SEQ ID NO: 22494 - DNA, 26 bp, Homo sapiens
ccgtccttcagccatttgacttgcgc

SEQ ID NO: 22495 - DNA, 26 bp, Homo sapiens
cgtccttcagccatttgacttgcgcc

SEQ ID NO: 22496 - DNA, 26 bp, Homo sapiens
gtccttcagccatttgacttgcgccc

SEQ ID NO: 22497 - DNA, 26 bp, Homo sapiens
tccttcagccatttgacttgcgcccc

SEQ ID NO: 22498 - DNA, 26 bp, Homo sapiens
ccttcagccatttgacttgcgccccc

SEQ ID NO: 22499 - DNA, 26 bp, Homo sapiens
cttcagccatttgacttgcgccccct

SEQ ID NO: 22500 - DNA, 26 bp, Homo sapiens
ttcagccatttgacttgcgccccctc

SEQ ID NO: 22501 - DNA, 26 bp, Homo sapiens
tcagccatttgacttgcgccccctcc

SEQ ID NO: 22502 - DNA, 26 bp, Homo sapiens
cagccatttgacttgcgccccctcct

SEQ ID NO: 22503 - DNA, 26 bp, Homo sapiens
agccatttgacttgcgccccctcctc

SEQ ID NO: 22504 - DNA, 26 bp, Homo sapiens
gccatttgacttgcgccccctcctcc

SEQ ID NO: 22505 - DNA, 26 bp, Homo sapiens
ccatttgacttgcgccccctcctccg

SEQ ID NO: 22506 - DNA, 26 bp, Homo sapiens
catttgacttgcgccccctcctccga

SEQ ID NO: 22507 - DNA, 26 bp, Homo sapiens
atttgacttgcgccccctcctccgat

SEQ ID NO: 22508 - DNA, 26 bp, Homo sapiens
tttgacttgcgccccctcctccgata

SEQ ID NO: 22509 - DNA, 26 bp, Homo sapiens
ttgacttgcgccccctcctccgatac

SEQ ID NO: 22510 - DNA, 26 bp, Homo sapiens
tgacttgcgccccctcctccgatact

SEQ ID NO: 22511 - DNA, 26 bp, Homo sapiens
gacttgcgccccctcctccgatactt

SEQ ID NO: 22512 - DNA, 26 bp, Homo sapiens
acttgcgccccctcctccgatacttc

SEQ ID NO: 22513 - DNA, 26 bp, Homo sapiens
cttgcgccccctcctccgatacttca

SEQ ID NO: 22514 - DNA, 26 bp, Homo sapiens
ttgcgccccctcctccgatacttcac

SEQ ID NO: 22515 - DNA, 26 bp, Homo sapiens
tgcgccccctcctccgatacttcaca

SEQ ID NO: 22516 - DNA, 26 bp, Homo sapiens
gcgccccctcctccgatacttcacac

SEQ ID NO: 22517 - DNA, 26 bp, Homo sapiens
cgccccctcctccgatacttcacact

SEQ ID NO: 22518 - DNA, 26 bp, Homo sapiens
gccccctcctccgatacttcacactc

SEQ ID NO: 22519 - DNA, 26 bp, Homo sapiens
ccccctcctccgatacttcacactca

SEQ ID NO: 22520 - DNA, 26 bp, Homo sapiens
cccctcctccgatacttcacactcaa

SEQ ID NO: 22521 - DNA, 26 bp, Homo sapiens
ccctcctccgatacttcacactcaaa

SEQ ID NO: 22522 - DNA, 26 bp, Homo sapiens
cctcctccgatacttcacactcaaac

SEQ ID NO: 22523 - DNA, 26 bp, Homo sapiens
ctcctccgatacttcacactcaaact

SEQ ID NO: 22524 - DNA, 26 bp, Homo sapiens
tcctccgatacttcacactcaaactc

SEQ ID NO: 22525 - DNA, 26 bp, Homo sapiens
cctccgatacttcacactcaaactcc

SEQ ID NO: 22526 - DNA, 26 bp, Homo sapiens
ctccgatacttcacactcaaactcca

SEQ ID NO: 22527 - DNA, 26 bp, Homo sapiens
tccgatacttcacactcaaactccac

SEQ ID NO: 22528 - DNA, 26 bp, Homo sapiens
ccgatacttcacactcaaactccacc

SEQ ID NO: 22529 - DNA, 26 bp, Homo sapiens
cgatacttcacactcaaactccaccc

SEQ ID NO: 22530 - DNA, 26 bp, Homo sapiens
gatacttcacactcaaactccacccg

SEQ ID NO: 22531 - DNA, 26 bp, Homo sapiens
atacttcacactcaaactccacccgc

SEQ ID NO: 22532 - DNA, 26 bp, Homo sapiens
tacttcacactcaaactccacccgct

SEQ ID NO: 22533 - DNA, 26 bp, Homo sapiens
acttcacactcaaactccacccgctg

SEQ ID NO: 22534 - DNA, 26 bp, Homo sapiens
cttcacactcaaactccacccgctgc

SEQ ID NO: 22535 - DNA, 26 bp, Homo sapiens
ttcacactcaaactccacccgctgcc

SEQ ID NO: 22536 - DNA, 26 bp, Homo sapiens
tcacactcaaactccacccgctgccc

SEQ ID NO: 22537 - DNA, 26 bp, Homo sapiens
cacactcaaactccacccgctgcccc

SEQ ID NO: 22538 - DNA, 26 bp, Homo sapiens
acactcaaactccacccgctgcccca

SEQ ID NO: 22539 - DNA, 26 bp, Homo sapiens
cactcaaactccacccgctgccccac

SEQ ID NO: 22540 - DNA, 26 bp, Homo sapiens
actcaaactccacccgctgccccacc

SEQ ID NO: 22541 - DNA, 26 bp, Homo sapiens
ctcaaactccacccgctgccccacca

SEQ ID NO: 22542 - DNA, 26 bp, Homo sapiens
tcaaactccacccgctgccccaccat

SEQ ID NO: 22543 - DNA, 26 bp, Homo sapiens
caaactccacccgctgccccaccatc

SEQ ID NO: 22544 - DNA, 26 bp, Homo sapiens
aaactccacccgctgccccaccatca

SEQ ID NO: 22545 - DNA, 26 bp, Homo sapiens
aactccacccgctgccccaccatcac

SEQ ID NO: 22546 - DNA, 26 bp, Homo sapiens
actccacccgctgccccaccatcacc

SEQ ID NO: 22547 - DNA, 26 bp, Homo sapiens
ctccacccgctgccccaccatcacca

SEQ ID NO: 22548 - DNA, 26 bp, Homo sapiens
tccacccgctgccccaccatcaccag

SEQ ID NO: 22549 - DNA, 26 bp, Homo sapiens
ccacccgctgccccaccatcaccagc

SEQ ID NO: 22550 - DNA, 26 bp, Homo sapiens
cacccgctgccccaccatcaccagct

SEQ ID NO: 22551 - DNA, 26 bp, Homo sapiens
acccgctgccccaccatcaccagctg

SEQ ID NO: 22552 - DNA, 26 bp, Homo sapiens
cccgctgccccaccatcaccagctgg

SEQ ID NO: 22553 - DNA, 26 bp, Homo sapiens
ccgctgccccaccatcaccagctggt

SEQ ID NO: 22554 - DNA, 26 bp, Homo sapiens
cgctgccccaccatcaccagctggtc

SEQ ID NO: 22555 - DNA, 26 bp, Homo sapiens
gctgccccaccatcaccagctggtcc

SEQ ID NO: 22556 - DNA, 26 bp, Homo sapiens
ctgccccaccatcaccagctggtcct

SEQ ID NO: 22557 - DNA, 26 bp, Homo sapiens
tgccccaccatcaccagctggtcctc

SEQ ID NO: 22558 - DNA, 26 bp, Homo sapiens
gccccaccatcaccagctggtcctcc

SEQ ID NO: 22559 - DNA, 26 bp, Homo sapiens
ccccaccatcaccagctggtcctcca

SEQ ID NO: 22560 - DNA, 26 bp, Homo sapiens
cccaccatcaccagctggtcctccaa

SEQ ID NO: 22561 - DNA, 26 bp, Homo sapiens
ccaccatcaccagctggtcctccaag

SEQ ID NO: 22562 - DNA, 26 bp, Homo sapiens
caccatcaccagctggtcctccaagg

SEQ ID NO: 22563 - DNA, 26 bp, Homo sapiens
accatcaccagctggtcctccaaggg

SEQ ID NO: 22564 - DNA, 26 bp, Homo sapiens
ccatcaccagctggtcctccaagggg

SEQ ID NO: 22565 - DNA, 26 bp, Homo sapiens
catcaccagctggtcctccaaggggc

SEQ ID NO: 22566 - DNA, 26 bp, Homo sapiens
atcaccagctggtcctccaaggggcg

SEQ ID NO: 22567 - DNA, 26 bp, Homo sapiens
tcaccagctggtcctccaaggggcgc

SEQ ID NO: 22568 - DNA, 26 bp, Homo sapiens
caccagctggtcctccaaggggcgcg

SEQ ID NO: 22569 - DNA, 26 bp, Homo sapiens
accagctggtcctccaaggggcgcgt

SEQ ID NO: 22570 - DNA, 26 bp, Homo sapiens
ccagctggtcctccaaggggcgcgtg

SEQ ID NO: 22571 - DNA, 26 bp, Homo sapiens
cagctggtcctccaaggggcgcgtga

SEQ ID NO: 22572 - DNA, 26 bp, Homo sapiens
agctggtcctccaaggggcgcgtgat

SEQ ID NO: 22573 - DNA, 26 bp, Homo sapiens
gctggtcctccaaggggcgcgtgatg

SEQ ID NO: 22574 - DNA, 26 bp, Homo sapiens
ctggtcctccaaggggcgcgtgatga

SEQ ID NO: 22575 - DNA, 26 bp, Homo sapiens
tggtcctccaaggggcgcgtgatgag

SEQ ID NO: 22576 - DNA, 26 bp, Homo sapiens
ggtcctccaaggggcgcgtgatgagc

SEQ ID NO: 22577 - DNA, 26 bp, Homo sapiens
gtcctccaaggggcgcgtgatgagca

SEQ ID NO: 22578 - DNA, 26 bp, Homo sapiens
tcctccaaggggcgcgtgatgagcac

SEQ ID NO: 22579 - DNA, 26 bp, Homo sapiens
cctccaaggggcgcgtgatgagcaca

SEQ ID NO: 22580 - DNA, 26 bp, Homo sapiens
ctccaaggggcgcgtgatgagcacag

SEQ ID NO: 22581 - DNA, 26 bp, Homo sapiens
tccaaggggcgcgtgatgagcacagg

SEQ ID NO: 22582 - DNA, 26 bp, Homo sapiens
ccaaggggcgcgtgatgagcacaggg

SEQ ID NO: 22583 - DNA, 26 bp, Homo sapiens
caaggggcgcgtgatgagcacagggg

SEQ ID NO: 22584 - DNA, 26 bp, Homo sapiens
aaggggcgcgtgatgagcacaggggg

SEQ ID NO: 22585 - DNA, 26 bp, Homo sapiens
aggggcgcgtgatgagcacagggggc

SEQ ID NO: 22586 - DNA, 26 bp, Homo sapiens
ggggcgcgtgatgagcacagggggct

SEQ ID NO: 22587 - DNA, 26 bp, Homo sapiens
gggcgcgtgatgagcacagggggctc

SEQ ID NO: 22588 - DNA, 26 bp, Homo sapiens
ggcgcgtgatgagcacagggggctct

SEQ ID NO: 22589 - DNA, 26 bp, Homo sapiens
gcgcgtgatgagcacagggggctctt

SEQ ID NO: 22590 - DNA, 26 bp, Homo sapiens
cgcgtgatgagcacagggggctcttt

SEQ ID NO: 22591 - DNA, 26 bp, Homo sapiens
gcgtgatgagcacagggggctctttc

SEQ ID NO: 22592 - DNA, 26 bp, Homo sapiens
cgtgatgagcacagggggctctttca

SEQ ID NO: 22593 - DNA, 26 bp, Homo sapiens
gtgatgagcacagggggctctttcac

SEQ ID NO: 22594 - DNA, 26 bp, Homo sapiens
tgatgagcacagggggctctttcaca

SEQ ID NO: 22595 - DNA, 26 bp, Homo sapiens
gatgagcacagggggctctttcacaa

SEQ ID NO: 22596 - DNA, 26 bp, Homo sapiens
atgagcacagggggctctttcacaaa

SEQ ID NO: 22597 - DNA, 26 bp, Homo sapiens
tgagcacagggggctctttcacaaag

SEQ ID NO: 22598 - DNA, 26 bp, Homo sapiens
gagcacagggggctctttcacaaaga

SEQ ID NO: 22599 - DNA, 26 bp, Homo sapiens
agcacagggggctctttcacaaagag

SEQ ID NO: 22600 - DNA, 26 bp, Homo sapiens
gcacagggggctctttcacaaagagc

SEQ ID NO: 22601 - DNA, 26 bp, Homo sapiens
cacagggggctctttcacaaagagct

SEQ ID NO: 22602 - DNA, 26 bp, Homo sapiens
acagggggctctttcacaaagagctc

SEQ ID NO: 22603 - DNA, 26 bp, Homo sapiens
cagggggctctttcacaaagagctcc

SEQ ID NO: 22604 - DNA, 26 bp, Homo sapiens
agggggctctttcacaaagagctccg

SEQ ID NO: 22605 - DNA, 26 bp, Homo sapiens
gggggctctttcacaaagagctccgt

SEQ ID NO: 22606 - DNA, 26 bp, Homo sapiens
ggggctctttcacaaagagctccgtg

SEQ ID NO: 22607 - DNA, 26 bp, Homo sapiens
gggctctttcacaaagagctccgtgc

SEQ ID NO: 22608 - DNA, 26 bp, Homo sapiens
ggctctttcacaaagagctccgtgct

SEQ ID NO: 22609 - DNA, 26 bp, Homo sapiens
gctctttcacaaagagctccgtgcta

SEQ ID NO: 22610 - DNA, 26 bp, Homo sapiens
ctctttcacaaagagctccgtgctac

SEQ ID NO: 22611 - DNA, 26 bp, Homo sapiens
tctttcacaaagagctccgtgctaca

SEQ ID NO: 22612 - DNA, 26 bp, Homo sapiens
ctttcacaaagagctccgtgctacac

SEQ ID NO: 22613 - DNA, 26 bp, Homo sapiens
tttcacaaagagctccgtgctacact

SEQ ID NO: 22614 - DNA, 26 bp, Homo sapiens
ttcacaaagagctccgtgctacactt

SEQ ID NO: 22615 - DNA, 26 bp, Homo sapiens
tcacaaagagctccgtgctacacttc

SEQ ID NO: 22616 - DNA, 26 bp, Homo sapiens
cacaaagagctccgtgctacacttct

SEQ ID NO: 22617 - DNA, 26 bp, Homo sapiens
acaaagagctccgtgctacacttctc

SEQ ID NO: 22618 - DNA, 26 bp, Homo sapiens
caaagagctccgtgctacacttctcg

SEQ ID NO: 22619 - DNA, 26 bp, Homo sapiens
aaagagctccgtgctacacttctcgc

SEQ ID NO: 22620 - DNA, 26 bp, Homo sapiens
aagagctccgtgctacacttctcgcc

SEQ ID NO: 22621 - DNA, 26 bp, Homo sapiens
agagctccgtgctacacttctcgcca

SEQ ID NO: 22622 - DNA, 26 bp, Homo sapiens
gagctccgtgctacacttctcgccac

SEQ ID NO: 22623 - DNA, 26 bp, Homo sapiens
agctccgtgctacacttctcgccacc

SEQ ID NO: 22624 - DNA, 26 bp, Homo sapiens
gctccgtgctacacttctcgccaccc

SEQ ID NO: 22625 - DNA, 26 bp, Homo sapiens
ctccgtgctacacttctcgccaccca

SEQ ID NO: 22626 - DNA, 26 bp, Homo sapiens
tccgtgctacacttctcgccacccac

SEQ ID NO: 22627 - DNA, 26 bp, Homo sapiens
ccgtgctacacttctcgccacccacc

SEQ ID NO: 22628 - DNA, 26 bp, Homo sapiens
cgtgctacacttctcgccacccacca

SEQ ID NO: 22629 - DNA, 26 bp, Homo sapiens
gtgctacacttctcgccacccaccac

SEQ ID NO: 22630 - DNA, 26 bp, Homo sapiens
tgctacacttctcgccacccaccacg

SEQ ID NO: 22631 - DNA, 26 bp, Homo sapiens
gctacacttctcgccacccaccacgc

SEQ ID NO: 22632 - DNA, 26 bp, Homo sapiens
ctacacttctcgccacccaccacgca

SEQ ID NO: 22633 - DNA, 26 bp, Homo sapiens
tacacttctcgccacccaccacgcac

SEQ ID NO: 22634 - DNA, 26 bp, Homo sapiens
acacttctcgccacccaccacgcact

SEQ ID NO: 22635 - DNA, 26 bp, Homo sapiens
cacttctcgccacccaccacgcactg

SEQ ID NO: 22636 - DNA, 26 bp, Homo sapiens
acttctcgccacccaccacgcactgg

SEQ ID NO: 22637 - DNA, 26 bp, Homo sapiens
cttctcgccacccaccacgcactggt

SEQ ID NO: 22638 - DNA, 26 bp, Homo sapiens
ttctcgccacccaccacgcactggta

SEQ ID NO: 22639 - DNA, 26 bp, Homo sapiens
tctcgccacccaccacgcactggtag

SEQ ID NO: 22640 - DNA, 26 bp, Homo sapiens
ctcgccacccaccacgcactggtagg

SEQ ID NO: 22641 - DNA, 26 bp, Homo sapiens
tcgccacccaccacgcactggtaggc

SEQ ID NO: 22642 - DNA, 26 bp, Homo sapiens
cgccacccaccacgcactggtaggct

SEQ ID NO: 22643 - DNA, 26 bp, Homo sapiens
gccacccaccacgcactggtaggctg

SEQ ID NO: 22644 - DNA, 26 bp, Homo sapiens
ccacccaccacgcactggtaggctgc

SEQ ID NO: 22645 - DNA, 26 bp, Homo sapiens
cacccaccacgcactggtaggctgcg

SEQ ID NO: 22646 - DNA, 26 bp, Homo sapiens
acccaccacgcactggtaggctgcgt

SEQ ID NO: 22647 - DNA, 26 bp, Homo sapiens
cccaccacgcactggtaggctgcgtc

SEQ ID NO: 22648 - DNA, 26 bp, Homo sapiens
ccaccacgcactggtaggctgcgtcg

SEQ ID NO: 22649 - DNA, 26 bp, Homo sapiens
caccacgcactggtaggctgcgtcgt

SEQ ID NO: 22650 - DNA, 26 bp, Homo sapiens
accacgcactggtaggctgcgtcgtc

SEQ ID NO: 22651 - DNA, 26 bp, Homo sapiens
ccacgcactggtaggctgcgtcgtcc

SEQ ID NO: 22652 - DNA, 26 bp, Homo sapiens
cacgcactggtaggctgcgtcgtccg

SEQ ID NO: 22653 - DNA, 26 bp, Homo sapiens
acgcactggtaggctgcgtcgtccgc

SEQ ID NO: 22654 - DNA, 26 bp, Homo sapiens
cgcactggtaggctgcgtcgtccgcc

SEQ ID NO: 22655 - DNA, 26 bp, Homo sapiens
gcactggtaggctgcgtcgtccgcca

SEQ ID NO: 22656 - DNA, 26 bp, Homo sapiens
cactggtaggctgcgtcgtccgccaa

SEQ ID NO: 22657 - DNA, 26 bp, Homo sapiens
actggtaggctgcgtcgtccgccaat

SEQ ID NO: 22658 - DNA, 26 bp, Homo sapiens
ctggtaggctgcgtcgtccgccaatg

SEQ ID NO: 22659 - DNA, 26 bp, Homo sapiens
tggtaggctgcgtcgtccgccaatga

SEQ ID NO: 22660 - DNA, 26 bp, Homo sapiens
ggtaggctgcgtcgtccgccaatgag

SEQ ID NO: 22661 - DNA, 26 bp, Homo sapiens
gtaggctgcgtcgtccgccaatgagc

SEQ ID NO: 22662 - DNA, 26 bp, Homo sapiens
taggctgcgtcgtccgccaatgagca

SEQ ID NO: 22663 - DNA, 26 bp, Homo sapiens
aggctgcgtcgtccgccaatgagcac

SEQ ID NO: 22664 - DNA, 26 bp, Homo sapiens
ggctgcgtcgtccgccaatgagcact

SEQ ID NO: 22665 - DNA, 26 bp, Homo sapiens
gctgcgtcgtccgccaatgagcactg

SEQ ID NO: 22666 - DNA, 26 bp, Homo sapiens
ctgcgtcgtccgccaatgagcactgg

SEQ ID NO: 22667 - DNA, 26 bp, Homo sapiens
tgcgtcgtccgccaatgagcactggc

SEQ ID NO: 22668 - DNA, 26 bp, Homo sapiens
gcgtcgtccgccaatgagcactggct

SEQ ID NO: 22669 - DNA, 26 bp, Homo sapiens
cgtcgtccgccaatgagcactggctg

SEQ ID NO: 22670 - DNA, 26 bp, Homo sapiens
gtcgtccgccaatgagcactggctga

SEQ ID NO: 22671 - DNA, 26 bp, Homo sapiens
tcgtccgccaatgagcactggctgat

SEQ ID NO: 22672 - DNA, 26 bp, Homo sapiens
cgtccgccaatgagcactggctgatg

SEQ ID NO: 22673 - DNA, 26 bp, Homo sapiens
gtccgccaatgagcactggctgatgg

SEQ ID NO: 22674 - DNA, 26 bp, Homo sapiens
tccgccaatgagcactggctgatggt

SEQ ID NO: 22675 - DNA, 26 bp, Homo sapiens
ccgccaatgagcactggctgatggtc

SEQ ID NO: 22676 - DNA, 26 bp, Homo sapiens
cgccaatgagcactggctgatggtca

SEQ ID NO: 22677 - DNA, 26 bp, Homo sapiens
gccaatgagcactggctgatggtcag

SEQ ID NO: 22678 - DNA, 26 bp, Homo sapiens
ccaatgagcactggctgatggtcagg

SEQ ID NO: 22679 - DNA, 26 bp, Homo sapiens
caatgagcactggctgatggtcaggg

SEQ ID NO: 22680 - DNA, 26 bp, Homo sapiens
aatgagcactggctgatggtcagggt

SEQ ID NO: 22681 - DNA, 26 bp, Homo sapiens
atgagcactggctgatggtcagggta

SEQ ID NO: 22682 - DNA, 26 bp, Homo sapiens
tgagcactggctgatggtcagggtac

SEQ ID NO: 22683 - DNA, 26 bp, Homo sapiens
gagcactggctgatggtcagggtacg

SEQ ID NO: 22684 - DNA, 26 bp, Homo sapiens
agcactggctgatggtcagggtacgc

SEQ ID NO: 22685 - DNA, 26 bp, Homo sapiens
gcactggctgatggtcagggtacgct

SEQ ID NO: 22686 - DNA, 26 bp, Homo sapiens
cactggctgatggtcagggtacgctt

SEQ ID NO: 22687 - DNA, 26 bp, Homo sapiens
actggctgatggtcagggtacgcttg

SEQ ID NO: 22688 - DNA, 26 bp, Homo sapiens
ctggctgatggtcagggtacgcttgg

SEQ ID NO: 22689 - DNA, 26 bp, Homo sapiens
tggctgatggtcagggtacgcttggc

SEQ ID NO: 22690 - DNA, 26 bp, Homo sapiens
ggctgatggtcagggtacgcttggca

SEQ ID NO: 22691 - DNA, 26 bp, Homo sapiens
gctgatggtcagggtacgcttggcac

SEQ ID NO: 22692 - DNA, 26 bp, Homo sapiens
ctgatggtcagggtacgcttggcacc

SEQ ID NO: 22693 - DNA, 26 bp, Homo sapiens
tgatggtcagggtacgcttggcaccg

SEQ ID NO: 22694 - DNA, 26 bp, Homo sapiens
gatggtcagggtacgcttggcaccga

SEQ ID NO: 22695 - DNA, 26 bp, Homo sapiens
atggtcagggtacgcttggcaccgat

SEQ ID NO: 22696 - DNA, 26 bp, Homo sapiens
tggtcagggtacgcttggcaccgatg

SEQ ID NO: 22697 - DNA, 26 bp, Homo sapiens
ggtcagggtacgcttggcaccgatgg

SEQ ID NO: 22698 - DNA, 26 bp, Homo sapiens
gtcagggtacgcttggcaccgatgga

SEQ ID NO: 22699 - DNA, 26 bp, Homo sapiens
tcagggtacgcttggcaccgatggac

SEQ ID NO: 22700 - DNA, 26 bp, Homo sapiens
cagggtacgcttggcaccgatggact

SEQ ID NO: 22701 - DNA, 26 bp, Homo sapiens
agggtacgcttggcaccgatggactc

SEQ ID NO: 22702 - DNA, 26 bp, Homo sapiens
gggtacgcttggcaccgatggactca

SEQ ID NO: 22703 - DNA, 26 bp, Homo sapiens
ggtacgcttggcaccgatggactcaa

SEQ ID NO: 22704 - DNA, 26 bp, Homo sapiens
gtacgcttggcaccgatggactcaaa

SEQ ID NO: 22705 - DNA, 26 bp, Homo sapiens
tacgcttggcaccgatggactcaaag

SEQ ID NO: 22706 - DNA, 26 bp, Homo sapiens
acgcttggcaccgatggactcaaaga

SEQ ID NO: 22707 - DNA, 26 bp, Homo sapiens
cgcttggcaccgatggactcaaagat

SEQ ID NO: 22708 - DNA, 26 bp, Homo sapiens
gcttggcaccgatggactcaaagatg

SEQ ID NO: 22709 - DNA, 26 bp, Homo sapiens
cttggcaccgatggactcaaagatgt

SEQ ID NO: 22710 - DNA, 26 bp, Homo sapiens
ttggcaccgatggactcaaagatgta

SEQ ID NO: 22711 - DNA, 26 bp, Homo sapiens
tggcaccgatggactcaaagatgtac

SEQ ID NO: 22712 - DNA, 26 bp, Homo sapiens
ggcaccgatggactcaaagatgtact

SEQ ID NO: 22713 - DNA, 26 bp, Homo sapiens
gcaccgatggactcaaagatgtactt

SEQ ID NO: 22714 - DNA, 26 bp, Homo sapiens
caccgatggactcaaagatgtacttg

SEQ ID NO: 22715 - DNA, 26 bp, Homo sapiens
accgatggactcaaagatgtacttgc

SEQ ID NO: 22716 - DNA, 26 bp, Homo sapiens
ccgatggactcaaagatgtacttgct

SEQ ID NO: 22717 - DNA, 26 bp, Homo sapiens
cgatggactcaaagatgtacttgctg

SEQ ID NO: 22718 - DNA, 26 bp, Homo sapiens
gatggactcaaagatgtacttgctgc

SEQ ID NO: 22719 - DNA, 26 bp, Homo sapiens
atggactcaaagatgtacttgctgcc

SEQ ID NO: 22720 - DNA, 26 bp, Homo sapiens
tggactcaaagatgtacttgctgccg

SEQ ID NO: 22721 - DNA, 26 bp, Homo sapiens
ggactcaaagatgtacttgctgccgc

SEQ ID NO: 22722 - DNA, 26 bp, Homo sapiens
gactcaaagatgtacttgctgccgct

SEQ ID NO: 22723 - DNA, 26 bp, Homo sapiens
actcaaagatgtacttgctgccgctc

SEQ ID NO: 22724 - DNA, 26 bp, Homo sapiens
ctcaaagatgtacttgctgccgctca

SEQ ID NO: 22725 - DNA, 26 bp, Homo sapiens
tcaaagatgtacttgctgccgctcat

SEQ ID NO: 22726 - DNA, 26 bp, Homo sapiens
caaagatgtacttgctgccgctcatc

SEQ ID NO: 22727 - DNA, 26 bp, Homo sapiens
aaagatgtacttgctgccgctcatct

SEQ ID NO: 22728 - DNA, 26 bp, Homo sapiens
aagatgtacttgctgccgctcatctg

SEQ ID NO: 22729 - DNA, 26 bp, Homo sapiens
agatgtacttgctgccgctcatctgg

SEQ ID NO: 22730 - DNA, 26 bp, Homo sapiens
gatgtacttgctgccgctcatctgga

SEQ ID NO: 22731 - DNA, 26 bp, Homo sapiens
atgtacttgctgccgctcatctggat

SEQ ID NO: 22732 - DNA, 26 bp, Homo sapiens
tgtacttgctgccgctcatctggatc

SEQ ID NO: 22733 - DNA, 26 bp, Homo sapiens
gtacttgctgccgctcatctggatct

SEQ ID NO: 22734 - DNA, 26 bp, Homo sapiens
tacttgctgccgctcatctggatctc

SEQ ID NO: 22735 - DNA, 26 bp, Homo sapiens
acttgctgccgctcatctggatctcc

SEQ ID NO: 22736 - DNA, 26 bp, Homo sapiens
cttgctgccgctcatctggatctcct

SEQ ID NO: 22737 - DNA, 26 bp, Homo sapiens
ttgctgccgctcatctggatctcctg

SEQ ID NO: 22738 - DNA, 26 bp, Homo sapiens
tgctgccgctcatctggatctcctgg

SEQ ID NO: 22739 - DNA, 26 bp, Homo sapiens
gctgccgctcatctggatctcctggc

SEQ ID NO: 22740 - DNA, 26 bp, Homo sapiens
ctgccgctcatctggatctcctggcc

SEQ ID NO: 22741 - DNA, 26 bp, Homo sapiens
tgccgctcatctggatctcctggcca

SEQ ID NO: 22742 - DNA, 26 bp, Homo sapiens
gccgctcatctggatctcctggccat

SEQ ID NO: 22743 - DNA, 26 bp, Homo sapiens
ccgctcatctggatctcctggccatt

SEQ ID NO: 22744 - DNA, 26 bp, Homo sapiens
cgctcatctggatctcctggccattc

SEQ ID NO: 22745 - DNA, 26 bp, Homo sapiens
gctcatctggatctcctggccattct

SEQ ID NO: 22746 - DNA, 26 bp, Homo sapiens
ctcatctggatctcctggccattctt

SEQ ID NO: 22747 - DNA, 26 bp, Homo sapiens
tcatctggatctcctggccattcttg

SEQ ID NO: 22748 - DNA, 26 bp, Homo sapiens
catctggatctcctggccattcttga

SEQ ID NO: 22749 - DNA, 26 bp, Homo sapiens
atctggatctcctggccattcttgag

SEQ ID NO: 22750 - DNA, 26 bp, Homo sapiens
tctggatctcctggccattcttgagc

SEQ ID NO: 22751 - DNA, 26 bp, Homo sapiens
ctggatctcctggccattcttgagcc

SEQ ID NO: 22752 - DNA, 26 bp, Homo sapiens
tggatctcctggccattcttgagcca

SEQ ID NO: 22753 - DNA, 26 bp, Homo sapiens
ggatctcctggccattcttgagccat

SEQ ID NO: 22754 - DNA, 26 bp, Homo sapiens
gatctcctggccattcttgagccatt

SEQ ID NO: 22755 - DNA, 26 bp, Homo sapiens
atctcctggccattcttgagccattt

SEQ ID NO: 22756 - DNA, 26 bp, Homo sapiens
tctcctggccattcttgagccatttg

SEQ ID NO: 22757 - DNA, 26 bp, Homo sapiens
ctcctggccattcttgagccatttga

SEQ ID NO: 22758 - DNA, 26 bp, Homo sapiens
tcctggccattcttgagccatttgac

SEQ ID NO: 22759 - DNA, 26 bp, Homo sapiens
cctggccattcttgagccatttgacc

SEQ ID NO: 22760 - DNA, 26 bp, Homo sapiens
ctggccattcttgagccatttgacct

SEQ ID NO: 22761 - DNA, 26 bp, Homo sapiens
tggccattcttgagccatttgacctc

SEQ ID NO: 22762 - DNA, 26 bp, Homo sapiens
ggccattcttgagccatttgacctca

SEQ ID NO: 22763 - DNA, 26 bp, Homo sapiens
gccattcttgagccatttgacctcag

SEQ ID NO: 22764 - DNA, 26 bp, Homo sapiens
ccattcttgagccatttgacctcagc

SEQ ID NO: 22765 - DNA, 26 bp, Homo sapiens
cattcttgagccatttgacctcagcg

SEQ ID NO: 22766 - DNA, 26 bp, Homo sapiens
attcttgagccatttgacctcagcgt

SEQ ID NO: 22767 - DNA, 26 bp, Homo sapiens
ttcttgagccatttgacctcagcgtc

SEQ ID NO: 22768 - DNA, 26 bp, Homo sapiens
tcttgagccatttgacctcagcgtca

SEQ ID NO: 22769 - DNA, 26 bp, Homo sapiens
cttgagccatttgacctcagcgtcat

SEQ ID NO: 22770 - DNA, 26 bp, Homo sapiens
ttgagccatttgacctcagcgtcatg

SEQ ID NO: 22771 - DNA, 26 bp, Homo sapiens
tgagccatttgacctcagcgtcatgg

SEQ ID NO: 22772 - DNA, 26 bp, Homo sapiens
gagccatttgacctcagcgtcatggt

SEQ ID NO: 22773 - DNA, 26 bp, Homo sapiens
agccatttgacctcagcgtcatggtc

SEQ ID NO: 22774 - DNA, 26 bp, Homo sapiens
gccatttgacctcagcgtcatggtca

SEQ ID NO: 22775 - DNA, 26 bp, Homo sapiens
ccatttgacctcagcgtcatggtcag

SEQ ID NO: 22776 - DNA, 26 bp, Homo sapiens
catttgacctcagcgtcatggtcagc

SEQ ID NO: 22777 - DNA, 26 bp, Homo sapiens
atttgacctcagcgtcatggtcagcc

SEQ ID NO: 22778 - DNA, 26 bp, Homo sapiens
tttgacctcagcgtcatggtcagcca

SEQ ID NO: 22779 - DNA, 26 bp, Homo sapiens
ttgacctcagcgtcatggtcagccag

SEQ ID NO: 22780 - DNA, 26 bp, Homo sapiens
tgacctcagcgtcatggtcagccagt

SEQ ID NO: 22781 - DNA, 26 bp, Homo sapiens
gacctcagcgtcatggtcagccagtt

SEQ ID NO: 22782 - DNA, 26 bp, Homo sapiens
acctcagcgtcatggtcagccagttc

SEQ ID NO: 22783 - DNA, 26 bp, Homo sapiens
cctcagcgtcatggtcagccagttcc

SEQ ID NO: 22784 - DNA, 26 bp, Homo sapiens
ctcagcgtcatggtcagccagttcca

SEQ ID NO: 22785 - DNA, 26 bp, Homo sapiens
tcagcgtcatggtcagccagttccac

SEQ ID NO: 22786 - DNA, 26 bp, Homo sapiens
cagcgtcatggtcagccagttccacg

SEQ ID NO: 22787 - DNA, 26 bp, Homo sapiens
agcgtcatggtcagccagttccacgg

SEQ ID NO: 22788 - DNA, 26 bp, Homo sapiens
gcgtcatggtcagccagttccacggt

SEQ ID NO: 22789 - DNA, 26 bp, Homo sapiens
cgtcatggtcagccagttccacggtc

SEQ ID NO: 22790 - DNA, 26 bp, Homo sapiens
gtcatggtcagccagttccacggtca

SEQ ID NO: 22791 - DNA, 26 bp, Homo sapiens
tcatggtcagccagttccacggtcag

SEQ ID NO: 22792 - DNA, 26 bp, Homo sapiens
catggtcagccagttccacggtcagc

SEQ ID NO: 22793 - DNA, 26 bp, Homo sapiens
atggtcagccagttccacggtcagcc

SEQ ID NO: 22794 - DNA, 26 bp, Homo sapiens
tggtcagccagttccacggtcagccg

SEQ ID NO: 22795 - DNA, 26 bp, Homo sapiens
ggtcagccagttccacggtcagccgg

SEQ ID NO: 22796 - DNA, 26 bp, Homo sapiens
gtcagccagttccacggtcagccgga

SEQ ID NO: 22797 - DNA, 26 bp, Homo sapiens
tcagccagttccacggtcagccggat

SEQ ID NO: 22798 - DNA, 26 bp, Homo sapiens
cagccagttccacggtcagccggatc

SEQ ID NO: 22799 - DNA, 26 bp, Homo sapiens
agccagttccacggtcagccggatct

SEQ ID NO: 22800 - DNA, 26 bp, Homo sapiens
gccagttccacggtcagccggatctt

SEQ ID NO: 22801 - DNA, 26 bp, Homo sapiens
ccagttccacggtcagccggatcttg

SEQ ID NO: 22802 - DNA, 26 bp, Homo sapiens
cagttccacggtcagccggatcttgt

SEQ ID NO: 22803 - DNA, 26 bp, Homo sapiens
agttccacggtcagccggatcttgtg

SEQ ID NO: 22804 - DNA, 26 bp, Homo sapiens
gttccacggtcagccggatcttgtgg

SEQ ID NO: 22805 - DNA, 26 bp, Homo sapiens
ttccacggtcagccggatcttgtggc

SEQ ID NO: 22806 - DNA, 26 bp, Homo sapiens
tccacggtcagccggatcttgtggcc

SEQ ID NO: 22807 - DNA, 26 bp, Homo sapiens
ccacggtcagccggatcttgtggcct

SEQ ID NO: 22808 - DNA, 26 bp, Homo sapiens
cacggtcagccggatcttgtggcctt

SEQ ID NO: 22809 - DNA, 26 bp, Homo sapiens
acggtcagccggatcttgtggccttt

SEQ ID NO: 22810 - DNA, 26 bp, Homo sapiens
cggtcagccggatcttgtggcctttg

SEQ ID NO: 22811 - DNA, 26 bp, Homo sapiens
ggtcagccggatcttgtggcctttgc

SEQ ID NO: 22812 - DNA, 26 bp, Homo sapiens
gtcagccggatcttgtggcctttgct

SEQ ID NO: 22813 - DNA, 26 bp, Homo sapiens
tcagccggatcttgtggcctttgctc

SEQ ID NO: 22814 - DNA, 26 bp, Homo sapiens
cagccggatcttgtggcctttgctca

SEQ ID NO: 22815 - DNA, 26 bp, Homo sapiens
agccggatcttgtggcctttgctcac

SEQ ID NO: 22816 - DNA, 26 bp, Homo sapiens
gccggatcttgtggcctttgctcacc

SEQ ID NO: 22817 - DNA, 26 bp, Homo sapiens
ccggatcttgtggcctttgctcacct

SEQ ID NO: 22818 - DNA, 26 bp, Homo sapiens
cggatcttgtggcctttgctcacctg

SEQ ID NO: 22819 - DNA, 26 bp, Homo sapiens
ggatcttgtggcctttgctcacctgg

SEQ ID NO: 22820 - DNA, 26 bp, Homo sapiens
gatcttgtggcctttgctcacctggt

SEQ ID NO: 22821 - DNA, 26 bp, Homo sapiens
atcttgtggcctttgctcacctggta

SEQ ID NO: 22822 - DNA, 26 bp, Homo sapiens
tcttgtggcctttgctcacctggtag

SEQ ID NO: 22823 - DNA, 26 bp, Homo sapiens
cttgtggcctttgctcacctggtagg

SEQ ID NO: 22824 - DNA, 26 bp, Homo sapiens
ttgtggcctttgctcacctggtaggc

SEQ ID NO: 22825 - DNA, 26 bp, Homo sapiens
tgtggcctttgctcacctggtaggcc

SEQ ID NO: 22826 - DNA, 26 bp, Homo sapiens
gtggcctttgctcacctggtaggccg

SEQ ID NO: 22827 - DNA, 26 bp, Homo sapiens
tggcctttgctcacctggtaggccgg

SEQ ID NO: 22828 - DNA, 26 bp, Homo sapiens
ggcctttgctcacctggtaggccggc

SEQ ID NO: 22829 - DNA, 26 bp, Homo sapiens
gcctttgctcacctggtaggccggct

SEQ ID NO: 22830 - DNA, 26 bp, Homo sapiens
cctttgctcacctggtaggccggctc

SEQ ID NO: 22831 - DNA, 26 bp, Homo sapiens
ctttgctcacctggtaggccggctcc

SEQ ID NO: 22832 - DNA, 26 bp, Homo sapiens
tttgctcacctggtaggccggctcca

SEQ ID NO: 22833 - DNA, 26 bp, Homo sapiens
ttgctcacctggtaggccggctccag

SEQ ID NO: 22834 - DNA, 26 bp, Homo sapiens
tgctcacctggtaggccggctccagc

SEQ ID NO: 22835 - DNA, 26 bp, Homo sapiens
gctcacctggtaggccggctccagct

SEQ ID NO: 22836 - DNA, 26 bp, Homo sapiens
ctcacctggtaggccggctccagctt

SEQ ID NO: 22837 - DNA, 26 bp, Homo sapiens
tcacctggtaggccggctccagcttc

SEQ ID NO: 22838 - DNA, 26 bp, Homo sapiens
cacctggtaggccggctccagcttct

SEQ ID NO: 22839 - DNA, 26 bp, Homo sapiens
acctggtaggccggctccagcttctt

SEQ ID NO: 22840 - DNA, 26 bp, Homo sapiens
cctggtaggccggctccagcttcttc

SEQ ID NO: 22841 - DNA, 26 bp, Homo sapiens
ctggtaggccggctccagcttcttct

SEQ ID NO: 22842 - DNA, 26 bp, Homo sapiens
tggtaggccggctccagcttcttctg

SEQ ID NO: 22843 - DNA, 26 bp, Homo sapiens
ggtaggccggctccagcttcttctga

SEQ ID NO: 22844 - DNA, 26 bp, Homo sapiens
gtaggccggctccagcttcttctgaa

SEQ ID NO: 22845 - DNA, 26 bp, Homo sapiens
taggccggctccagcttcttctgaaa

SEQ ID NO: 22846 - DNA, 26 bp, Homo sapiens
aggccggctccagcttcttctgaaag

SEQ ID NO: 22847 - DNA, 26 bp, Homo sapiens
ggccggctccagcttcttctgaaagg

SEQ ID NO: 22848 - DNA, 26 bp, Homo sapiens
gccggctccagcttcttctgaaaggc

SEQ ID NO: 22849 - DNA, 26 bp, Homo sapiens
ccggctccagcttcttctgaaaggct

SEQ ID NO: 22850 - DNA, 26 bp, Homo sapiens
cggctccagcttcttctgaaaggctg

SEQ ID NO: 22851 - DNA, 26 bp, Homo sapiens
ggctccagcttcttctgaaaggctgt

SEQ ID NO: 22852 - DNA, 26 bp, Homo sapiens
gctccagcttcttctgaaaggctgtg

SEQ ID NO: 22853 - DNA, 26 bp, Homo sapiens
ctccagcttcttctgaaaggctgtgc

SEQ ID NO: 22854 - DNA, 26 bp, Homo sapiens
tccagcttcttctgaaaggctgtgct

SEQ ID NO: 22855 - DNA, 26 bp, Homo sapiens
ccagcttcttctgaaaggctgtgctc

SEQ ID NO: 22856 - DNA, 26 bp, Homo sapiens
cagcttcttctgaaaggctgtgctct

SEQ ID NO: 22857 - DNA, 26 bp, Homo sapiens
agcttcttctgaaaggctgtgctctt

SEQ ID NO: 22858 - DNA, 26 bp, Homo sapiens
gcttcttctgaaaggctgtgctcttc

SEQ ID NO: 22859 - DNA, 26 bp, Homo sapiens
cttcttctgaaaggctgtgctcttct

SEQ ID NO: 22860 - DNA, 26 bp, Homo sapiens
ttcttctgaaaggctgtgctcttctt

SEQ ID NO: 22861 - DNA, 26 bp, Homo sapiens
tcttctgaaaggctgtgctcttcttc

SEQ ID NO: 22862 - DNA, 26 bp, Homo sapiens
cttctgaaaggctgtgctcttcttct

SEQ ID NO: 22863 - DNA, 26 bp, Homo sapiens
ttctgaaaggctgtgctcttcttctc

SEQ ID NO: 22864 - DNA, 26 bp, Homo sapiens
tctgaaaggctgtgctcttcttctca

SEQ ID NO: 22865 - DNA, 26 bp, Homo sapiens
ctgaaaggctgtgctcttcttctcat

SEQ ID NO: 22866 - DNA, 26 bp, Homo sapiens
tgaaaggctgtgctcttcttctcatc

SEQ ID NO: 22867 - DNA, 26 bp, Homo sapiens
gaaaggctgtgctcttcttctcatcg

SEQ ID NO: 22868 - DNA, 26 bp, Homo sapiens
aaaggctgtgctcttcttctcatcgc

SEQ ID NO: 22869 - DNA, 26 bp, Homo sapiens
aaggctgtgctcttcttctcatcgcg

SEQ ID NO: 22870 - DNA, 26 bp, Homo sapiens
aggctgtgctcttcttctcatcgcgc

SEQ ID NO: 22871 - DNA, 26 bp, Homo sapiens
ggctgtgctcttcttctcatcgcgcc

SEQ ID NO: 22872 - DNA, 26 bp, Homo sapiens
gctgtgctcttcttctcatcgcgcct

SEQ ID NO: 22873 - DNA, 26 bp, Homo sapiens
ctgtgctcttcttctcatcgcgcctc

SEQ ID NO: 22874 - DNA, 26 bp, Homo sapiens
tgtgctcttcttctcatcgcgcctca

SEQ ID NO: 22875 - DNA, 26 bp, Homo sapiens
gtgctcttcttctcatcgcgcctcat

SEQ ID NO: 22876 - DNA, 26 bp, Homo sapiens
tgctcttcttctcatcgcgcctcatg

SEQ ID NO: 22877 - DNA, 26 bp, Homo sapiens
gctcttcttctcatcgcgcctcatgc

SEQ ID NO: 22878 - DNA, 26 bp, Homo sapiens
ctcttcttctcatcgcgcctcatgcc

SEQ ID NO: 22879 - DNA, 26 bp, Homo sapiens
tcttcttctcatcgcgcctcatgccc

SEQ ID NO: 22880 - DNA, 26 bp, Homo sapiens
cttcttctcatcgcgcctcatgccct

SEQ ID NO: 22881 - DNA, 26 bp, Homo sapiens
ttcttctcatcgcgcctcatgccctt

SEQ ID NO: 22882 - DNA, 26 bp, Homo sapiens
tcttctcatcgcgcctcatgcccttg

SEQ ID NO: 22883 - DNA, 26 bp, Homo sapiens
cttctcatcgcgcctcatgcccttga

SEQ ID NO: 22884 - DNA, 26 bp, Homo sapiens
ttctcatcgcgcctcatgcccttgag

SEQ ID NO: 22885 - DNA, 26 bp, Homo sapiens
tctcatcgcgcctcatgcccttgagc

SEQ ID NO: 22886 - DNA, 26 bp, Homo sapiens
ctcatcgcgcctcatgcccttgagcc

SEQ ID NO: 22887 - DNA, 26 bp, Homo sapiens
tcatcgcgcctcatgcccttgagcct

SEQ ID NO: 22888 - DNA, 26 bp, Homo sapiens
catcgcgcctcatgcccttgagcctc

SEQ ID NO: 22889 - DNA, 26 bp, Homo sapiens
atcgcgcctcatgcccttgagcctct

SEQ ID NO: 22890 - DNA, 26 bp, Homo sapiens
tcgcgcctcatgcccttgagcctctt

SEQ ID NO: 22891 - DNA, 26 bp, Homo sapiens
cgcgcctcatgcccttgagcctcttt

SEQ ID NO: 22892 - DNA, 26 bp, Homo sapiens
gcgcctcatgcccttgagcctcttta

SEQ ID NO: 22893 - DNA, 26 bp, Homo sapiens
cgcctcatgcccttgagcctctttag

SEQ ID NO: 22894 - DNA, 26 bp, Homo sapiens
gcctcatgcccttgagcctctttagc

SEQ ID NO: 22895 - DNA, 26 bp, Homo sapiens
cctcatgcccttgagcctctttagca

SEQ ID NO: 22896 - DNA, 26 bp, Homo sapiens
ctcatgcccttgagcctctttagcat

SEQ ID NO: 22897 - DNA, 26 bp, Homo sapiens
tcatgcccttgagcctctttagcatg

SEQ ID NO: 22898 - DNA, 26 bp, Homo sapiens
catgcccttgagcctctttagcatgc

SEQ ID NO: 22899 - DNA, 26 bp, Homo sapiens
atgcccttgagcctctttagcatgcc

SEQ ID NO: 22900 - DNA, 26 bp, Homo sapiens
tgcccttgagcctctttagcatgccg

SEQ ID NO: 22901 - DNA, 26 bp, Homo sapiens
gcccttgagcctctttagcatgccgc

SEQ ID NO: 22902 - DNA, 26 bp, Homo sapiens
cccttgagcctctttagcatgccgcg

SEQ ID NO: 22903 - DNA, 26 bp, Homo sapiens
ccttgagcctctttagcatgccgcgc

SEQ ID NO: 22904 - DNA, 26 bp, Homo sapiens
cttgagcctctttagcatgccgcgca

SEQ ID NO: 22905 - DNA, 26 bp, Homo sapiens
ttgagcctctttagcatgccgcgcag

SEQ ID NO: 22906 - DNA, 26 bp, Homo sapiens
tgagcctctttagcatgccgcgcagg

SEQ ID NO: 22907 - DNA, 26 bp, Homo sapiens
gagcctctttagcatgccgcgcaggt

SEQ ID NO: 22908 - DNA, 26 bp, Homo sapiens
agcctctttagcatgccgcgcaggtc

SEQ ID NO: 22909 - DNA, 26 bp, Homo sapiens
gcctctttagcatgccgcgcaggtca

SEQ ID NO: 22910 - DNA, 26 bp, Homo sapiens
cctctttagcatgccgcgcaggtcag

SEQ ID NO: 22911 - DNA, 26 bp, Homo sapiens
ctctttagcatgccgcgcaggtcagt

SEQ ID NO: 22912 - DNA, 26 bp, Homo sapiens
tctttagcatgccgcgcaggtcagtg

SEQ ID NO: 22913 - DNA, 26 bp, Homo sapiens
ctttagcatgccgcgcaggtcagtga

SEQ ID NO: 22914 - DNA, 26 bp, Homo sapiens
tttagcatgccgcgcaggtcagtgac

SEQ ID NO: 22915 - DNA, 26 bp, Homo sapiens
ttagcatgccgcgcaggtcagtgacg

SEQ ID NO: 22916 - DNA, 26 bp, Homo sapiens
tagcatgccgcgcaggtcagtgacgc

SEQ ID NO: 22917 - DNA, 26 bp, Homo sapiens
agcatgccgcgcaggtcagtgacgcc

SEQ ID NO: 22918 - DNA, 26 bp, Homo sapiens
gcatgccgcgcaggtcagtgacgccg

SEQ ID NO: 22919 - DNA, 26 bp, Homo sapiens
catgccgcgcaggtcagtgacgccgt

SEQ ID NO: 22920 - DNA, 26 bp, Homo sapiens
atgccgcgcaggtcagtgacgccgta

SEQ ID NO: 22921 - DNA, 26 bp, Homo sapiens
tgccgcgcaggtcagtgacgccgtac

SEQ ID NO: 22922 - DNA, 26 bp, Homo sapiens
gccgcgcaggtcagtgacgccgtact

SEQ ID NO: 22923 - DNA, 26 bp, Homo sapiens
ccgcgcaggtcagtgacgccgtactg

SEQ ID NO: 22924 - DNA, 26 bp, Homo sapiens
cgcgcaggtcagtgacgccgtactgg

SEQ ID NO: 22925 - DNA, 26 bp, Homo sapiens
gcgcaggtcagtgacgccgtactgga

SEQ ID NO: 22926 - DNA, 26 bp, Homo sapiens
cgcaggtcagtgacgccgtactggaa

SEQ ID NO: 22927 - DNA, 26 bp, Homo sapiens
gcaggtcagtgacgccgtactggaag

SEQ ID NO: 22928 - DNA, 26 bp, Homo sapiens
caggtcagtgacgccgtactggaagg

SEQ ID NO: 22929 - DNA, 26 bp, Homo sapiens
aggtcagtgacgccgtactggaaggc

SEQ ID NO: 22930 - DNA, 26 bp, Homo sapiens
ggtcagtgacgccgtactggaaggcg

SEQ ID NO: 22931 - DNA, 26 bp, Homo sapiens
gtcagtgacgccgtactggaaggcga

SEQ ID NO: 22932 - DNA, 26 bp, Homo sapiens
tcagtgacgccgtactggaaggcgat

SEQ ID NO: 22933 - DNA, 26 bp, Homo sapiens
cagtgacgccgtactggaaggcgatg

SEQ ID NO: 22934 - DNA, 26 bp, Homo sapiens
agtgacgccgtactggaaggcgatgc

SEQ ID NO: 22935 - DNA, 26 bp, Homo sapiens
gtgacgccgtactggaaggcgatgcg

SEQ ID NO: 22936 - DNA, 26 bp, Homo sapiens
tgacgccgtactggaaggcgatgcgc

SEQ ID NO: 22937 - DNA, 26 bp, Homo sapiens
gacgccgtactggaaggcgatgcgct

SEQ ID NO: 22938 - DNA, 26 bp, Homo sapiens
acgccgtactggaaggcgatgcgctc

SEQ ID NO: 22939 - DNA, 26 bp, Homo sapiens
cgccgtactggaaggcgatgcgctcg

SEQ ID NO: 22940 - DNA, 26 bp, Homo sapiens
gccgtactggaaggcgatgcgctcgt

SEQ ID NO: 22941 - DNA, 26 bp, Homo sapiens
ccgtactggaaggcgatgcgctcgta

SEQ ID NO: 22942 - DNA, 26 bp, Homo sapiens
cgtactggaaggcgatgcgctcgtac

SEQ ID NO: 22943 - DNA, 26 bp, Homo sapiens
gtactggaaggcgatgcgctcgtact

SEQ ID NO: 22944 - DNA, 26 bp, Homo sapiens
tactggaaggcgatgcgctcgtactc

SEQ ID NO: 22945 - DNA, 26 bp, Homo sapiens
actggaaggcgatgcgctcgtactca

SEQ ID NO: 22946 - DNA, 26 bp, Homo sapiens
ctggaaggcgatgcgctcgtactcag

SEQ ID NO: 22947 - DNA, 26 bp, Homo sapiens
tggaaggcgatgcgctcgtactcaga

SEQ ID NO: 22948 - DNA, 26 bp, Homo sapiens
ggaaggcgatgcgctcgtactcagat

SEQ ID NO: 22949 - DNA, 26 bp, Homo sapiens
gaaggcgatgcgctcgtactcagatg

SEQ ID NO: 22950 - DNA, 26 bp, Homo sapiens
aaggcgatgcgctcgtactcagatgg

SEQ ID NO: 22951 - DNA, 26 bp, Homo sapiens
aggcgatgcgctcgtactcagatggg

SEQ ID NO: 22952 - DNA, 26 bp, Homo sapiens
ggcgatgcgctcgtactcagatgggg

SEQ ID NO: 22953 - DNA, 26 bp, Homo sapiens
gcgatgcgctcgtactcagatggggg

SEQ ID NO: 22954 - DNA, 26 bp, Homo sapiens
cgatgcgctcgtactcagatgggggt

SEQ ID NO: 22955 - DNA, 26 bp, Homo sapiens
gatgcgctcgtactcagatgggggtg

SEQ ID NO: 22956 - DNA, 26 bp, Homo sapiens
atgcgctcgtactcagatgggggtgc

SEQ ID NO: 22957 - DNA, 26 bp, Homo sapiens
tgcgctcgtactcagatgggggtgcc

SEQ ID NO: 22958 - DNA, 26 bp, Homo sapiens
gcgctcgtactcagatgggggtgcct

SEQ ID NO: 22959 - DNA, 26 bp, Homo sapiens
cgctcgtactcagatgggggtgcctg

SEQ ID NO: 22960 - DNA, 26 bp, Homo sapiens
gctcgtactcagatgggggtgcctgc

SEQ ID NO: 22961 - DNA, 26 bp, Homo sapiens
ctcgtactcagatgggggtgcctgcc

SEQ ID NO: 22962 - DNA, 26 bp, Homo sapiens
tcgtactcagatgggggtgcctgccg

SEQ ID NO: 22963 - DNA, 26 bp, Homo sapiens
cgtactcagatgggggtgcctgccgt

SEQ ID NO: 22964 - DNA, 26 bp, Homo sapiens
gtactcagatgggggtgcctgccgta

SEQ ID NO: 22965 - DNA, 26 bp, Homo sapiens
tactcagatgggggtgcctgccgtag

SEQ ID NO: 22966 - DNA, 26 bp, Homo sapiens
actcagatgggggtgcctgccgtagg

SEQ ID NO: 22967 - DNA, 26 bp, Homo sapiens
ctcagatgggggtgcctgccgtagga

SEQ ID NO: 22968 - DNA, 26 bp, Homo sapiens
tcagatgggggtgcctgccgtaggat

SEQ ID NO: 22969 - DNA, 26 bp, Homo sapiens
cagatgggggtgcctgccgtaggatc

SEQ ID NO: 22970 - DNA, 26 bp, Homo sapiens
agatgggggtgcctgccgtaggatct

SEQ ID NO: 22971 - DNA, 26 bp, Homo sapiens
gatgggggtgcctgccgtaggatctc

SEQ ID NO: 22972 - DNA, 26 bp, Homo sapiens
atgggggtgcctgccgtaggatctcc

SEQ ID NO: 22973 - DNA, 26 bp, Homo sapiens
tgggggtgcctgccgtaggatctccc

SEQ ID NO: 22974 - DNA, 26 bp, Homo sapiens
gggggtgcctgccgtaggatctccca

SEQ ID NO: 22975 - DNA, 26 bp, Homo sapiens
ggggtgcctgccgtaggatctcccac

SEQ ID NO: 22976 - DNA, 26 bp, Homo sapiens
gggtgcctgccgtaggatctcccaca

SEQ ID NO: 22977 - DNA, 26 bp, Homo sapiens
ggtgcctgccgtaggatctcccacac

SEQ ID NO: 22978 - DNA, 26 bp, Homo sapiens
gtgcctgccgtaggatctcccacacg

SEQ ID NO: 22979 - DNA, 26 bp, Homo sapiens
tgcctgccgtaggatctcccacacgt

SEQ ID NO: 22980 - DNA, 26 bp, Homo sapiens
gcctgccgtaggatctcccacacgtc

SEQ ID NO: 22981 - DNA, 26 bp, Homo sapiens
cctgccgtaggatctcccacacgtcc

SEQ ID NO: 22982 - DNA, 26 bp, Homo sapiens
ctgccgtaggatctcccacacgtcct

SEQ ID NO: 22983 - DNA, 26 bp, Homo sapiens
tgccgtaggatctcccacacgtcctc

SEQ ID NO: 22984 - DNA, 26 bp, Homo sapiens
gccgtaggatctcccacacgtcctcc

SEQ ID NO: 22985 - DNA, 26 bp, Homo sapiens
ccgtaggatctcccacacgtcctcct

SEQ ID NO: 22986 - DNA, 26 bp, Homo sapiens
cgtaggatctcccacacgtcctcctc

SEQ ID NO: 22987 - DNA, 26 bp, Homo sapiens
gtaggatctcccacacgtcctcctct

SEQ ID NO: 22988 - DNA, 26 bp, Homo sapiens
taggatctcccacacgtcctcctctg

SEQ ID NO: 22989 - DNA, 26 bp, Homo sapiens
aggatctcccacacgtcctcctctgc

SEQ ID NO: 22990 - DNA, 26 bp, Homo sapiens
ggatctcccacacgtcctcctctgct

SEQ ID NO: 22991 - DNA, 26 bp, Homo sapiens
gatctcccacacgtcctcctctgctg

SEQ ID NO: 22992 - DNA, 26 bp, Homo sapiens
atctcccacacgtcctcctctgctgg

SEQ ID NO: 22993 - DNA, 26 bp, Homo sapiens
tctcccacacgtcctcctctgctggt

SEQ ID NO: 22994 - DNA, 26 bp, Homo sapiens
ctcccacacgtcctcctctgctggtg

SEQ ID NO: 22995 - DNA, 26 bp, Homo sapiens
tcccacacgtcctcctctgctggtgc

SEQ ID NO: 22996 - DNA, 26 bp, Homo sapiens
cccacacgtcctcctctgctggtgcc

SEQ ID NO: 22997 - DNA, 26 bp, Homo sapiens
ccacacgtcctcctctgctggtgcct

SEQ ID NO: 22998 - DNA, 26 bp, Homo sapiens
cacacgtcctcctctgctggtgcctc

SEQ ID NO: 22999 - DNA, 26 bp, Homo sapiens
acacgtcctcctctgctggtgcctcc

SEQ ID NO: 23000 - DNA, 26 bp, Homo sapiens
cacgtcctcctctgctggtgcctcca

SEQ ID NO: 23001 - DNA, 26 bp, Homo sapiens
acgtcctcctctgctggtgcctccag

SEQ ID NO: 23002 - DNA, 26 bp, Homo sapiens
cgtcctcctctgctggtgcctccagc

SEQ ID NO: 23003 - DNA, 26 bp, Homo sapiens
gtcctcctctgctggtgcctccagct

SEQ ID NO: 23004 - DNA, 26 bp, Homo sapiens
tcctcctctgctggtgcctccagctt

SEQ ID NO: 23005 - DNA, 26 bp, Homo sapiens
cctcctctgctggtgcctccagcttc

SEQ ID NO: 23006 - DNA, 26 bp, Homo sapiens
ctcctctgctggtgcctccagcttcg

SEQ ID NO: 23007 - DNA, 26 bp, Homo sapiens
tcctctgctggtgcctccagcttcga

SEQ ID NO: 23008 - DNA, 26 bp, Homo sapiens
cctctgctggtgcctccagcttcgag

SEQ ID NO: 23009 - DNA, 26 bp, Homo sapiens
ctctgctggtgcctccagcttcgagt

SEQ ID NO: 23010 - DNA, 26 bp, Homo sapiens
tctgctggtgcctccagcttcgagtc

SEQ ID NO: 23011 - DNA, 26 bp, Homo sapiens
ctgctggtgcctccagcttcgagtcc

SEQ ID NO: 23012 - DNA, 26 bp, Homo sapiens
tgctggtgcctccagcttcgagtccc

SEQ ID NO: 23013 - DNA, 26 bp, Homo sapiens
gctggtgcctccagcttcgagtccct

SEQ ID NO: 23014 - DNA, 26 bp, Homo sapiens
ctggtgcctccagcttcgagtccctc

SEQ ID NO: 23015 - DNA, 26 bp, Homo sapiens
tggtgcctccagcttcgagtccctcg

SEQ ID NO: 23016 - DNA, 26 bp, Homo sapiens
ggtgcctccagcttcgagtccctcgg

SEQ ID NO: 23017 - DNA, 26 bp, Homo sapiens
gtgcctccagcttcgagtccctcggg

SEQ ID NO: 23018 - DNA, 26 bp, Homo sapiens
tgcctccagcttcgagtccctcgggg

SEQ ID NO: 23019 - DNA, 26 bp, Homo sapiens
gcctccagcttcgagtccctcggggt

SEQ ID NO: 23020 - DNA, 26 bp, Homo sapiens
cctccagcttcgagtccctcggggtc

SEQ ID NO: 23021 - DNA, 26 bp, Homo sapiens
ctccagcttcgagtccctcggggtcc

SEQ ID NO: 23022 - DNA, 26 bp, Homo sapiens
tccagcttcgagtccctcggggtccg

SEQ ID NO: 23023 - DNA, 26 bp, Homo sapiens
ccagcttcgagtccctcggggtccgg

SEQ ID NO: 23024 - DNA, 26 bp, Homo sapiens
cagcttcgagtccctcggggtccgga

SEQ ID NO: 23025 - DNA, 26 bp, Homo sapiens
agcttcgagtccctcggggtccggaa

SEQ ID NO: 23026 - DNA, 26 bp, Homo sapiens
gcttcgagtccctcggggtccggaaa

SEQ ID NO: 23027 - DNA, 26 bp, Homo sapiens
cttcgagtccctcggggtccggaaac

SEQ ID NO: 23028 - DNA, 26 bp, Homo sapiens
ttcgagtccctcggggtccggaaact

SEQ ID NO: 23029 - DNA, 26 bp, Homo sapiens
tcgagtccctcggggtccggaaactg

SEQ ID NO: 23030 - DNA, 26 bp, Homo sapiens
cgagtccctcggggtccggaaactgt

SEQ ID NO: 23031 - DNA, 26 bp, Homo sapiens
gagtccctcggggtccggaaactgtc

SEQ ID NO: 23032 - DNA, 26 bp, Homo sapiens
agtccctcggggtccggaaactgtct

SEQ ID NO: 23033 - DNA, 26 bp, Homo sapiens
gtccctcggggtccggaaactgtctc

SEQ ID NO: 23034 - DNA, 26 bp, Homo sapiens
tccctcggggtccggaaactgtctct

SEQ ID NO: 23035 - DNA, 26 bp, Homo sapiens
ccctcggggtccggaaactgtctctc

SEQ ID NO: 23036 - DNA, 26 bp, Homo sapiens
cctcggggtccggaaactgtctctct

SEQ ID NO: 23037 - DNA, 26 bp, Homo sapiens
ctcggggtccggaaactgtctctctt

SEQ ID NO: 23038 - DNA, 26 bp, Homo sapiens
tcggggtccggaaactgtctctcttt

SEQ ID NO: 23039 - DNA, 26 bp, Homo sapiens
cggggtccggaaactgtctctctttt

SEQ ID NO: 23040 - DNA, 26 bp, Homo sapiens
ggggtccggaaactgtctctcttttt

SEQ ID NO: 23041 - DNA, 26 bp, Homo sapiens
gggtccggaaactgtctctctttttc

SEQ ID NO: 23042 - DNA, 26 bp, Homo sapiens
ggtccggaaactgtctctctttttca

SEQ ID NO: 23043 - DNA, 26 bp, Homo sapiens
gtccggaaactgtctctctttttcag

SEQ ID NO: 23044 - DNA, 26 bp, Homo sapiens
tccggaaactgtctctctttttcagc

SEQ ID NO: 23045 - DNA, 26 bp, Homo sapiens
ccggaaactgtctctctttttcagca

SEQ ID NO: 23046 - DNA, 26 bp, Homo sapiens
cggaaactgtctctctttttcagcag

SEQ ID NO: 23047 - DNA, 26 bp, Homo sapiens
ggaaactgtctctctttttcagcagt

SEQ ID NO: 23048 - DNA, 26 bp, Homo sapiens
gaaactgtctctctttttcagcagtg

SEQ ID NO: 23049 - DNA, 26 bp, Homo sapiens
aaactgtctctctttttcagcagtga

SEQ ID NO: 23050 - DNA, 26 bp, Homo sapiens
aactgtctctctttttcagcagtgag

SEQ ID NO: 23051 - DNA, 26 bp, Homo sapiens
actgtctctctttttcagcagtgagc

SEQ ID NO: 23052 - DNA, 26 bp, Homo sapiens
ctgtctctctttttcagcagtgagct

SEQ ID NO: 23053 - DNA, 26 bp, Homo sapiens
tgtctctctttttcagcagtgagctg

SEQ ID NO: 23054 - DNA, 26 bp, Homo sapiens
gtctctctttttcagcagtgagctga

SEQ ID NO: 23055 - DNA, 26 bp, Homo sapiens
tctctctttttcagcagtgagctgaa

SEQ ID NO: 23056 - DNA, 26 bp, Homo sapiens
ctctctttttcagcagtgagctgaag

SEQ ID NO: 23057 - DNA, 26 bp, Homo sapiens
tctctttttcagcagtgagctgaagt

SEQ ID NO: 23058 - DNA, 26 bp, Homo sapiens
ctctttttcagcagtgagctgaagtc

SEQ ID NO: 23059 - DNA, 26 bp, Homo sapiens
tctttttcagcagtgagctgaagtcc

SEQ ID NO: 23060 - DNA, 26 bp, Homo sapiens
ctttttcagcagtgagctgaagtcca

SEQ ID NO: 23061 - DNA, 26 bp, Homo sapiens
tttttcagcagtgagctgaagtccag

SEQ ID NO: 23062 - DNA, 26 bp, Homo sapiens
ttttcagcagtgagctgaagtccaga

SEQ ID NO: 23063 - DNA, 26 bp, Homo sapiens
tttcagcagtgagctgaagtccagaa

SEQ ID NO: 23064 - DNA, 26 bp, Homo sapiens
ttcagcagtgagctgaagtccagaat

SEQ ID NO: 23065 - DNA, 26 bp, Homo sapiens
tcagcagtgagctgaagtccagaatc

SEQ ID NO: 23066 - DNA, 26 bp, Homo sapiens
cagcagtgagctgaagtccagaatcc

SEQ ID NO: 23067 - DNA, 26 bp, Homo sapiens
agcagtgagctgaagtccagaatccc

SEQ ID NO: 23068 - DNA, 26 bp, Homo sapiens
gcagtgagctgaagtccagaatccca

SEQ ID NO: 23069 - DNA, 26 bp, Homo sapiens
cagtgagctgaagtccagaatcccag

SEQ ID NO: 23070 - DNA, 26 bp, Homo sapiens
agtgagctgaagtccagaatcccagt

SEQ ID NO: 23071 - DNA, 26 bp, Homo sapiens
gtgagctgaagtccagaatcccagtg

SEQ ID NO: 23072 - DNA, 26 bp, Homo sapiens
tgagctgaagtccagaatcccagtgt

SEQ ID NO: 23073 - DNA, 26 bp, Homo sapiens
gagctgaagtccagaatcccagtgtc

SEQ ID NO: 23074 - DNA, 26 bp, Homo sapiens
agctgaagtccagaatcccagtgtcc

SEQ ID NO: 23075 - DNA, 26 bp, Homo sapiens
gctgaagtccagaatcccagtgtcct

SEQ ID NO: 23076 - DNA, 26 bp, Homo sapiens
ctgaagtccagaatcccagtgtcctc

SEQ ID NO: 23077 - DNA, 26 bp, Homo sapiens
tgaagtccagaatcccagtgtcctca

SEQ ID NO: 23078 - DNA, 26 bp, Homo sapiens
gaagtccagaatcccagtgtcctcat

SEQ ID NO: 23079 - DNA, 26 bp, Homo sapiens
aagtccagaatcccagtgtcctcatg

SEQ ID NO: 23080 - DNA, 26 bp, Homo sapiens
agtccagaatcccagtgtcctcatgg

SEQ ID NO: 23081 - DNA, 26 bp, Homo sapiens
gtccagaatcccagtgtcctcatggc

SEQ ID NO: 23082 - DNA, 26 bp, Homo sapiens
tccagaatcccagtgtcctcatggct

SEQ ID NO: 23083 - DNA, 26 bp, Homo sapiens
ccagaatcccagtgtcctcatggcta

SEQ ID NO: 23084 - DNA, 26 bp, Homo sapiens
cagaatcccagtgtcctcatggctat

SEQ ID NO: 23085 - DNA, 26 bp, Homo sapiens
agaatcccagtgtcctcatggctatc

SEQ ID NO: 23086 - DNA, 26 bp, Homo sapiens
gaatcccagtgtcctcatggctatca

SEQ ID NO: 23087 - DNA, 26 bp, Homo sapiens
aatcccagtgtcctcatggctatcac

SEQ ID NO: 23088 - DNA, 26 bp, Homo sapiens
atcccagtgtcctcatggctatcact

SEQ ID NO: 23089 - DNA, 26 bp, Homo sapiens
tcccagtgtcctcatggctatcactg

SEQ ID NO: 23090 - DNA, 26 bp, Homo sapiens
cccagtgtcctcatggctatcactga

SEQ ID NO: 23091 - DNA, 26 bp, Homo sapiens
ccagtgtcctcatggctatcactgat

SEQ ID NO: 23092 - DNA, 26 bp, Homo sapiens
cagtgtcctcatggctatcactgatc

SEQ ID NO: 23093 - DNA, 26 bp, Homo sapiens
agtgtcctcatggctatcactgatcc

SEQ ID NO: 23094 - DNA, 26 bp, Homo sapiens
gtgtcctcatggctatcactgatccg

SEQ ID NO: 23095 - DNA, 26 bp, Homo sapiens
tgtcctcatggctatcactgatccgc

SEQ ID NO: 23096 - DNA, 26 bp, Homo sapiens
gtcctcatggctatcactgatccgcc

SEQ ID NO: 23097 - DNA, 26 bp, Homo sapiens
tcctcatggctatcactgatccgccg

SEQ ID NO: 23098 - DNA, 26 bp, Homo sapiens
cctcatggctatcactgatccgccga

SEQ ID NO: 23099 - DNA, 26 bp, Homo sapiens
ctcatggctatcactgatccgccgac

SEQ ID NO: 23100 - DNA, 26 bp, Homo sapiens
tcatggctatcactgatccgccgacc

SEQ ID NO: 23101 - DNA, 26 bp, Homo sapiens
catggctatcactgatccgccgacca

SEQ ID NO: 23102 - DNA, 26 bp, Homo sapiens
atggctatcactgatccgccgaccac

SEQ ID NO: 23103 - DNA, 26 bp, Homo sapiens
tggctatcactgatccgccgaccacc

SEQ ID NO: 23104 - DNA, 26 bp, Homo sapiens
ggctatcactgatccgccgaccacct

SEQ ID NO: 23105 - DNA, 26 bp, Homo sapiens
gctatcactgatccgccgaccacctc

SEQ ID NO: 23106 - DNA, 26 bp, Homo sapiens
ctatcactgatccgccgaccacctcc

SEQ ID NO: 23107 - DNA, 26 bp, Homo sapiens
tatcactgatccgccgaccacctcca

SEQ ID NO: 23108 - DNA, 26 bp, Homo sapiens
atcactgatccgccgaccacctccag

SEQ ID NO: 23109 - DNA, 26 bp, Homo sapiens
tcactgatccgccgaccacctccagc

SEQ ID NO: 23110 - DNA, 26 bp, Homo sapiens
cactgatccgccgaccacctccagcc

SEQ ID NO: 23111 - DNA, 26 bp, Homo sapiens
actgatccgccgaccacctccagcca

SEQ ID NO: 23112 - DNA, 26 bp, Homo sapiens
ctgatccgccgaccacctccagccag

SEQ ID NO: 23113 - DNA, 26 bp, Homo sapiens
tgatccgccgaccacctccagccagg

SEQ ID NO: 23114 - DNA, 26 bp, Homo sapiens
gatccgccgaccacctccagccaggc

SEQ ID NO: 23115 - DNA, 26 bp, Homo sapiens
atccgccgaccacctccagccaggct

SEQ ID NO: 23116 - DNA, 26 bp, Homo sapiens
tccgccgaccacctccagccaggctc

SEQ ID NO: 23117 - DNA, 26 bp, Homo sapiens
ccgccgaccacctccagccaggctcg

SEQ ID NO: 23118 - DNA, 26 bp, Homo sapiens
cgccgaccacctccagccaggctcgt

SEQ ID NO: 23119 - DNA, 26 bp, Homo sapiens
gccgaccacctccagccaggctcgtg

SEQ ID NO: 23120 - DNA, 26 bp, Homo sapiens
ccgaccacctccagccaggctcgtgc

SEQ ID NO: 23121 - DNA, 26 bp, Homo sapiens
cgaccacctccagccaggctcgtgcg

SEQ ID NO: 23122 - DNA, 26 bp, Homo sapiens
gaccacctccagccaggctcgtgcgg

SEQ ID NO: 23123 - DNA, 26 bp, Homo sapiens
accacctccagccaggctcgtgcggc

SEQ ID NO: 23124 - DNA, 26 bp, Homo sapiens
ccacctccagccaggctcgtgcggcg

SEQ ID NO: 23125 - DNA, 26 bp, Homo sapiens
cacctccagccaggctcgtgcggcgg

SEQ ID NO: 23126 - DNA, 26 bp, Homo sapiens
acctccagccaggctcgtgcggcgga

SEQ ID NO: 23127 - DNA, 26 bp, Homo sapiens
cctccagccaggctcgtgcggcggaa

SEQ ID NO: 23128 - DNA, 26 bp, Homo sapiens
ctccagccaggctcgtgcggcggaag

SEQ ID NO: 23129 - DNA, 26 bp, Homo sapiens
tccagccaggctcgtgcggcggaagg

SEQ ID NO: 23130 - DNA, 26 bp, Homo sapiens
ccagccaggctcgtgcggcggaaggc

SEQ ID NO: 23131 - DNA, 26 bp, Homo sapiens
cagccaggctcgtgcggcggaaggct

SEQ ID NO: 23132 - DNA, 26 bp, Homo sapiens
agccaggctcgtgcggcggaaggctg

SEQ ID NO: 23133 - DNA, 26 bp, Homo sapiens
gccaggctcgtgcggcggaaggctga

SEQ ID NO: 23134 - DNA, 26 bp, Homo sapiens
ccaggctcgtgcggcggaaggctgat

SEQ ID NO: 23135 - DNA, 26 bp, Homo sapiens
caggctcgtgcggcggaaggctgata

SEQ ID NO: 23136 - DNA, 26 bp, Homo sapiens
aggctcgtgcggcggaaggctgatag

SEQ ID NO: 23137 - DNA, 26 bp, Homo sapiens
ggctcgtgcggcggaaggctgatagg

SEQ ID NO: 23138 - DNA, 26 bp, Homo sapiens
gctcgtgcggcggaaggctgatagga

SEQ ID NO: 23139 - DNA, 26 bp, Homo sapiens
ctcgtgcggcggaaggctgataggag

SEQ ID NO: 23140 - DNA, 26 bp, Homo sapiens
tcgtgcggcggaaggctgataggagg

SEQ ID NO: 23141 - DNA, 26 bp, Homo sapiens
cgtgcggcggaaggctgataggaggt

SEQ ID NO: 23142 - DNA, 26 bp, Homo sapiens
gtgcggcggaaggctgataggaggtc

SEQ ID NO: 23143 - DNA, 26 bp, Homo sapiens
tgcggcggaaggctgataggaggtcc

SEQ ID NO: 23144 - DNA, 26 bp, Homo sapiens
gcggcggaaggctgataggaggtcca

SEQ ID NO: 23145 - DNA, 26 bp, Homo sapiens
cggcggaaggctgataggaggtccag

SEQ ID NO: 23146 - DNA, 26 bp, Homo sapiens
ggcggaaggctgataggaggtccagg

SEQ ID NO: 23147 - DNA, 26 bp, Homo sapiens
gcggaaggctgataggaggtccaggt

SEQ ID NO: 23148 - DNA, 26 bp, Homo sapiens
cggaaggctgataggaggtccaggtc

SEQ ID NO: 23149 - DNA, 26 bp, Homo sapiens
ggaaggctgataggaggtccaggtct

SEQ ID NO: 23150 - DNA, 26 bp, Homo sapiens
gaaggctgataggaggtccaggtctc

SEQ ID NO: 23151 - DNA, 26 bp, Homo sapiens
aaggctgataggaggtccaggtctcc

SEQ ID NO: 23152 - DNA, 26 bp, Homo sapiens
aggctgataggaggtccaggtctccg

SEQ ID NO: 23153 - DNA, 26 bp, Homo sapiens
ggctgataggaggtccaggtctccgg

SEQ ID NO: 23154 - DNA, 26 bp, Homo sapiens
gctgataggaggtccaggtctccggt

SEQ ID NO: 23155 - DNA, 26 bp, Homo sapiens
ctgataggaggtccaggtctccggtg

SEQ ID NO: 23156 - DNA, 26 bp, Homo sapiens
tgataggaggtccaggtctccggtgc

SEQ ID NO: 23157 - DNA, 26 bp, Homo sapiens
gataggaggtccaggtctccggtgcc

SEQ ID NO: 23158 - DNA, 26 bp, Homo sapiens
ataggaggtccaggtctccggtgccc

SEQ ID NO: 23159 - DNA, 26 bp, Homo sapiens
taggaggtccaggtctccggtgccca

SEQ ID NO: 23160 - DNA, 26 bp, Homo sapiens
aggaggtccaggtctccggtgcccat

SEQ ID NO: 23161 - DNA, 26 bp, Homo sapiens
ggaggtccaggtctccggtgcccatg

SEQ ID NO: 23162 - DNA, 26 bp, Homo sapiens
gaggtccaggtctccggtgcccatgg

SEQ ID NO: 23163 - DNA, 26 bp, Homo sapiens
aggtccaggtctccggtgcccatggc

SEQ ID NO: 23164 - DNA, 26 bp, Homo sapiens
ggtccaggtctccggtgcccatggcc

SEQ ID NO: 23165 - DNA, 26 bp, Homo sapiens
gtccaggtctccggtgcccatggcct

SEQ ID NO: 23166 - DNA, 26 bp, Homo sapiens
tccaggtctccggtgcccatggcctc

SEQ ID NO: 23167 - DNA, 26 bp, Homo sapiens
ccaggtctccggtgcccatggcctcg

SEQ ID NO: 23168 - DNA, 26 bp, Homo sapiens
caggtctccggtgcccatggcctcgt

SEQ ID NO: 23169 - DNA, 26 bp, Homo sapiens
aggtctccggtgcccatggcctcgtg

SEQ ID NO: 23170 - DNA, 26 bp, Homo sapiens
ggtctccggtgcccatggcctcgtgg

SEQ ID NO: 23171 - DNA, 26 bp, Homo sapiens
gtctccggtgcccatggcctcgtgga

SEQ ID NO: 23172 - DNA, 26 bp, Homo sapiens
tctccggtgcccatggcctcgtggac

SEQ ID NO: 23173 - DNA, 26 bp, Homo sapiens
ctccggtgcccatggcctcgtggaca

SEQ ID NO: 23174 - DNA, 26 bp, Homo sapiens
tccggtgcccatggcctcgtggacag

SEQ ID NO: 23175 - DNA, 26 bp, Homo sapiens
ccggtgcccatggcctcgtggacagt

SEQ ID NO: 23176 - DNA, 26 bp, Homo sapiens
cggtgcccatggcctcgtggacagtg

SEQ ID NO: 23177 - DNA, 26 bp, Homo sapiens
ggtgcccatggcctcgtggacagtga

SEQ ID NO: 23178 - DNA, 26 bp, Homo sapiens
gtgcccatggcctcgtggacagtgag

SEQ ID NO: 23179 - DNA, 26 bp, Homo sapiens
tgcccatggcctcgtggacagtgaga

SEQ ID NO: 23180 - DNA, 26 bp, Homo sapiens
gcccatggcctcgtggacagtgagat

SEQ ID NO: 23181 - DNA, 26 bp, Homo sapiens
cccatggcctcgtggacagtgagatt

SEQ ID NO: 23182 - DNA, 26 bp, Homo sapiens
ccatggcctcgtggacagtgagattg

SEQ ID NO: 23183 - DNA, 26 bp, Homo sapiens
catggcctcgtggacagtgagattga

SEQ ID NO: 23184 - DNA, 26 bp, Homo sapiens
atggcctcgtggacagtgagattgaa

SEQ ID NO: 23185 - DNA, 26 bp, Homo sapiens
tggcctcgtggacagtgagattgaag

SEQ ID NO: 23186 - DNA, 26 bp, Homo sapiens
ggcctcgtggacagtgagattgaagt

SEQ ID NO: 23187 - DNA, 26 bp, Homo sapiens
gcctcgtggacagtgagattgaagtt

SEQ ID NO: 23188 - DNA, 26 bp, Homo sapiens
cctcgtggacagtgagattgaagttg

SEQ ID NO: 23189 - DNA, 26 bp, Homo sapiens
ctcgtggacagtgagattgaagttgg

SEQ ID NO: 23190 - DNA, 26 bp, Homo sapiens
tcgtggacagtgagattgaagttgga

SEQ ID NO: 23191 - DNA, 26 bp, Homo sapiens
cgtggacagtgagattgaagttggag

SEQ ID NO: 23192 - DNA, 26 bp, Homo sapiens
gtggacagtgagattgaagttggagc

SEQ ID NO: 23193 - DNA, 26 bp, Homo sapiens
tggacagtgagattgaagttggagca

SEQ ID NO: 23194 - DNA, 26 bp, Homo sapiens
ggacagtgagattgaagttggagcag

SEQ ID NO: 23195 - DNA, 26 bp, Homo sapiens
gacagtgagattgaagttggagcagt

SEQ ID NO: 23196 - DNA, 26 bp, Homo sapiens
acagtgagattgaagttggagcagtc

SEQ ID NO: 23197 - DNA, 26 bp, Homo sapiens
cagtgagattgaagttggagcagtca

SEQ ID NO: 23198 - DNA, 26 bp, Homo sapiens
agtgagattgaagttggagcagtcaa

SEQ ID NO: 23199 - DNA, 26 bp, Homo sapiens
gtgagattgaagttggagcagtcaaa

SEQ ID NO: 23200 - DNA, 26 bp, Homo sapiens
tgagattgaagttggagcagtcaaat

SEQ ID NO: 23201 - DNA, 26 bp, Homo sapiens
gagattgaagttggagcagtcaaatt

SEQ ID NO: 23202 - DNA, 26 bp, Homo sapiens
agattgaagttggagcagtcaaattt

SEQ ID NO: 23203 - DNA, 26 bp, Homo sapiens
gattgaagttggagcagtcaaatttg

SEQ ID NO: 23204 - DNA, 26 bp, Homo sapiens
attgaagttggagcagtcaaatttgt

SEQ ID NO: 23205 - DNA, 26 bp, Homo sapiens
ttgaagttggagcagtcaaatttgtc

SEQ ID NO: 23206 - DNA, 26 bp, Homo sapiens
tgaagttggagcagtcaaatttgtcc

SEQ ID NO: 23207 - DNA, 26 bp, Homo sapiens
gaagttggagcagtcaaatttgtcct

SEQ ID NO: 23208 - DNA, 26 bp, Homo sapiens
aagttggagcagtcaaatttgtcctt

SEQ ID NO: 23209 - DNA, 26 bp, Homo sapiens
agttggagcagtcaaatttgtccttg

SEQ ID NO: 23210 - DNA, 26 bp, Homo sapiens
gttggagcagtcaaatttgtccttgg

SEQ ID NO: 23211 - DNA, 26 bp, Homo sapiens
ttggagcagtcaaatttgtccttggt

SEQ ID NO: 23212 - DNA, 26 bp, Homo sapiens
tggagcagtcaaatttgtccttggtg

SEQ ID NO: 23213 - DNA, 26 bp, Homo sapiens
ggagcagtcaaatttgtccttggtgg

SEQ ID NO: 23214 - DNA, 26 bp, Homo sapiens
gagcagtcaaatttgtccttggtgga

SEQ ID NO: 23215 - DNA, 26 bp, Homo sapiens
agcagtcaaatttgtccttggtggac

SEQ ID NO: 23216 - DNA, 26 bp, Homo sapiens
gcagtcaaatttgtccttggtggaca

SEQ ID NO: 23217 - DNA, 26 bp, Homo sapiens
cagtcaaatttgtccttggtggacac

SEQ ID NO: 23218 - DNA, 26 bp, Homo sapiens
agtcaaatttgtccttggtggacacc

SEQ ID NO: 23219 - DNA, 26 bp, Homo sapiens
gtcaaatttgtccttggtggacacct

SEQ ID NO: 23220 - DNA, 26 bp, Homo sapiens
tcaaatttgtccttggtggacacctc

SEQ ID NO: 23221 - DNA, 26 bp, Homo sapiens
caaatttgtccttggtggacacctca

SEQ ID NO: 23222 - DNA, 26 bp, Homo sapiens
aaatttgtccttggtggacacctcac

SEQ ID NO: 23223 - DNA, 26 bp, Homo sapiens
aatttgtccttggtggacacctcaca

SEQ ID NO: 23224 - DNA, 26 bp, Homo sapiens
atttgtccttggtggacacctcacag

SEQ ID NO: 23225 - DNA, 26 bp, Homo sapiens
tttgtccttggtggacacctcacagc

SEQ ID NO: 23226 - DNA, 26 bp, Homo sapiens
ttgtccttggtggacacctcacagcg

SEQ ID NO: 23227 - DNA, 26 bp, Homo sapiens
tgtccttggtggacacctcacagcgg

SEQ ID NO: 23228 - DNA, 26 bp, Homo sapiens
gtccttggtggacacctcacagcggt

SEQ ID NO: 23229 - DNA, 26 bp, Homo sapiens
tccttggtggacacctcacagcggta

SEQ ID NO: 23230 - DNA, 26 bp, Homo sapiens
ccttggtggacacctcacagcggtag

SEQ ID NO: 23231 - DNA, 26 bp, Homo sapiens
cttggtggacacctcacagcggtagc

SEQ ID NO: 23232 - DNA, 26 bp, Homo sapiens
ttggtggacacctcacagcggtagct

SEQ ID NO: 23233 - DNA, 26 bp, Homo sapiens
tggtggacacctcacagcggtagctg

SEQ ID NO: 23234 - DNA, 26 bp, Homo sapiens
ggtggacacctcacagcggtagctgc

SEQ ID NO: 23235 - DNA, 26 bp, Homo sapiens
gtggacacctcacagcggtagctgcc

SEQ ID NO: 23236 - DNA, 26 bp, Homo sapiens
tggacacctcacagcggtagctgcca

SEQ ID NO: 23237 - DNA, 26 bp, Homo sapiens
ggacacctcacagcggtagctgccag

SEQ ID NO: 23238 - DNA, 26 bp, Homo sapiens
gacacctcacagcggtagctgccagt

SEQ ID NO: 23239 - DNA, 26 bp, Homo sapiens
acacctcacagcggtagctgccagtg

SEQ ID NO: 23240 - DNA, 26 bp, Homo sapiens
cacctcacagcggtagctgccagtga

SEQ ID NO: 23241 - DNA, 26 bp, Homo sapiens
acctcacagcggtagctgccagtgaa

SEQ ID NO: 23242 - DNA, 26 bp, Homo sapiens
cctcacagcggtagctgccagtgaag

SEQ ID NO: 23243 - DNA, 26 bp, Homo sapiens
ctcacagcggtagctgccagtgaagg

SEQ ID NO: 23244 - DNA, 26 bp, Homo sapiens
tcacagcggtagctgccagtgaaggc

SEQ ID NO: 23245 - DNA, 26 bp, Homo sapiens
cacagcggtagctgccagtgaaggca

SEQ ID NO: 23246 - DNA, 26 bp, Homo sapiens
acagcggtagctgccagtgaaggcag

SEQ ID NO: 23247 - DNA, 26 bp, Homo sapiens
cagcggtagctgccagtgaaggcagg

SEQ ID NO: 23248 - DNA, 26 bp, Homo sapiens
agcggtagctgccagtgaaggcaggc

SEQ ID NO: 23249 - DNA, 26 bp, Homo sapiens
gcggtagctgccagtgaaggcaggct

SEQ ID NO: 23250 - DNA, 26 bp, Homo sapiens
cggtagctgccagtgaaggcaggctg

SEQ ID NO: 23251 - DNA, 26 bp, Homo sapiens
ggtagctgccagtgaaggcaggctgg

SEQ ID NO: 23252 - DNA, 26 bp, Homo sapiens
gtagctgccagtgaaggcaggctggg

SEQ ID NO: 23253 - DNA, 26 bp, Homo sapiens
tagctgccagtgaaggcaggctgggc

SEQ ID NO: 23254 - DNA, 26 bp, Homo sapiens
agctgccagtgaaggcaggctgggca

SEQ ID NO: 23255 - DNA, 26 bp, Homo sapiens
gctgccagtgaaggcaggctgggcat

SEQ ID NO: 23256 - DNA, 26 bp, Homo sapiens
ctgccagtgaaggcaggctgggcatc

SEQ ID NO: 23257 - DNA, 26 bp, Homo sapiens
tgccagtgaaggcaggctgggcatcg

SEQ ID NO: 23258 - DNA, 26 bp, Homo sapiens
gccagtgaaggcaggctgggcatcgg

SEQ ID NO: 23259 - DNA, 26 bp, Homo sapiens
ccagtgaaggcaggctgggcatcggt

SEQ ID NO: 23260 - DNA, 26 bp, Homo sapiens
cagtgaaggcaggctgggcatcggtg

SEQ ID NO: 23261 - DNA, 26 bp, Homo sapiens
agtgaaggcaggctgggcatcggtga

SEQ ID NO: 23262 - DNA, 26 bp, Homo sapiens
gtgaaggcaggctgggcatcggtgat

SEQ ID NO: 23263 - DNA, 26 bp, Homo sapiens
tgaaggcaggctgggcatcggtgatg

SEQ ID NO: 23264 - DNA, 26 bp, Homo sapiens
gaaggcaggctgggcatcggtgatgt

SEQ ID NO: 23265 - DNA, 26 bp, Homo sapiens
aaggcaggctgggcatcggtgatgtg

SEQ ID NO: 23266 - DNA, 26 bp, Homo sapiens
aggcaggctgggcatcggtgatgtgc

SEQ ID NO: 23267 - DNA, 26 bp, Homo sapiens
ggcaggctgggcatcggtgatgtgca

SEQ ID NO: 23268 - DNA, 26 bp, Homo sapiens
gcaggctgggcatcggtgatgtgcag

SEQ ID NO: 23269 - DNA, 26 bp, Homo sapiens
caggctgggcatcggtgatgtgcagc

SEQ ID NO: 23270 - DNA, 26 bp, Homo sapiens
aggctgggcatcggtgatgtgcagct

SEQ ID NO: 23271 - DNA, 26 bp, Homo sapiens
ggctgggcatcggtgatgtgcagctc

SEQ ID NO: 23272 - DNA, 26 bp, Homo sapiens
gctgggcatcggtgatgtgcagctcg

SEQ ID NO: 23273 - DNA, 26 bp, Homo sapiens
ctgggcatcggtgatgtgcagctcga

SEQ ID NO: 23274 - DNA, 26 bp, Homo sapiens
tgggcatcggtgatgtgcagctcgaa

SEQ ID NO: 23275 - DNA, 26 bp, Homo sapiens
gggcatcggtgatgtgcagctcgaac

SEQ ID NO: 23276 - DNA, 26 bp, Homo sapiens
ggcatcggtgatgtgcagctcgaaca

SEQ ID NO: 23277 - DNA, 26 bp, Homo sapiens
gcatcggtgatgtgcagctcgaacag

SEQ ID NO: 23278 - DNA, 26 bp, Homo sapiens
catcggtgatgtgcagctcgaacaga

SEQ ID NO: 23279 - DNA, 26 bp, Homo sapiens
atcggtgatgtgcagctcgaacagat

SEQ ID NO: 23280 - DNA, 26 bp, Homo sapiens
tcggtgatgtgcagctcgaacagata

SEQ ID NO: 23281 - DNA, 26 bp, Homo sapiens
cggtgatgtgcagctcgaacagatag

SEQ ID NO: 23282 - DNA, 26 bp, Homo sapiens
ggtgatgtgcagctcgaacagataga

SEQ ID NO: 23283 - DNA, 26 bp, Homo sapiens
gtgatgtgcagctcgaacagatagac

SEQ ID NO: 23284 - DNA, 26 bp, Homo sapiens
tgatgtgcagctcgaacagatagacc

SEQ ID NO: 23285 - DNA, 26 bp, Homo sapiens
gatgtgcagctcgaacagatagacct

SEQ ID NO: 23286 - DNA, 26 bp, Homo sapiens
atgtgcagctcgaacagatagacctt

SEQ ID NO: 23287 - DNA, 26 bp, Homo sapiens
tgtgcagctcgaacagatagaccttg

SEQ ID NO: 23288 - DNA, 26 bp, Homo sapiens
gtgcagctcgaacagatagaccttgc

SEQ ID NO: 23289 - DNA, 26 bp, Homo sapiens
tgcagctcgaacagatagaccttgct

SEQ ID NO: 23290 - DNA, 26 bp, Homo sapiens
gcagctcgaacagatagaccttgctg

SEQ ID NO: 23291 - DNA, 26 bp, Homo sapiens
cagctcgaacagatagaccttgctgg

SEQ ID NO: 23292 - DNA, 26 bp, Homo sapiens
agctcgaacagatagaccttgctggc

SEQ ID NO: 23293 - DNA, 26 bp, Homo sapiens
gctcgaacagatagaccttgctggcg

SEQ ID NO: 23294 - DNA, 26 bp, Homo sapiens
ctcgaacagatagaccttgctggcgc

SEQ ID NO: 23295 - DNA, 26 bp, Homo sapiens
tcgaacagatagaccttgctggcgcg

SEQ ID NO: 23296 - DNA, 26 bp, Homo sapiens
cgaacagatagaccttgctggcgcgg

SEQ ID NO: 23297 - DNA, 26 bp, Homo sapiens
gaacagatagaccttgctggcgcggt

SEQ ID NO: 23298 - DNA, 26 bp, Homo sapiens
aacagatagaccttgctggcgcggtc

SEQ ID NO: 23299 - DNA, 26 bp, Homo sapiens
acagatagaccttgctggcgcggtcg

SEQ ID NO: 23300 - DNA, 26 bp, Homo sapiens
cagatagaccttgctggcgcggtcgt

SEQ ID NO: 23301 - DNA, 26 bp, Homo sapiens
agatagaccttgctggcgcggtcgta

SEQ ID NO: 23302 - DNA, 26 bp, Homo sapiens
gatagaccttgctggcgcggtcgtag

SEQ ID NO: 23303 - DNA, 26 bp, Homo sapiens
atagaccttgctggcgcggtcgtagc

SEQ ID NO: 23304 - DNA, 26 bp, Homo sapiens
tagaccttgctggcgcggtcgtagct

SEQ ID NO: 23305 - DNA, 26 bp, Homo sapiens
agaccttgctggcgcggtcgtagctg

SEQ ID NO: 23306 - DNA, 26 bp, Homo sapiens
gaccttgctggcgcggtcgtagctgt

SEQ ID NO: 23307 - DNA, 26 bp, Homo sapiens
accttgctggcgcggtcgtagctgtc

SEQ ID NO: 23308 - DNA, 26 bp, Homo sapiens
ccttgctggcgcggtcgtagctgtcg

SEQ ID NO: 23309 - DNA, 26 bp, Homo sapiens
cttgctggcgcggtcgtagctgtcgt

SEQ ID NO: 23310 - DNA, 26 bp, Homo sapiens
ttgctggcgcggtcgtagctgtcgtg

SEQ ID NO: 23311 - DNA, 26 bp, Homo sapiens
tgctggcgcggtcgtagctgtcgtgc

SEQ ID NO: 23312 - DNA, 26 bp, Homo sapiens
gctggcgcggtcgtagctgtcgtgca

SEQ ID NO: 23313 - DNA, 26 bp, Homo sapiens
ctggcgcggtcgtagctgtcgtgcag

SEQ ID NO: 23314 - DNA, 26 bp, Homo sapiens
tggcgcggtcgtagctgtcgtgcagc

SEQ ID NO: 23315 - DNA, 26 bp, Homo sapiens
ggcgcggtcgtagctgtcgtgcagct

SEQ ID NO: 23316 - DNA, 26 bp, Homo sapiens
gcgcggtcgtagctgtcgtgcagctg

SEQ ID NO: 23317 - DNA, 26 bp, Homo sapiens
cgcggtcgtagctgtcgtgcagctgc

SEQ ID NO: 23318 - DNA, 26 bp, Homo sapiens
gcggtcgtagctgtcgtgcagctgca

SEQ ID NO: 23319 - DNA, 26 bp, Homo sapiens
cggtcgtagctgtcgtgcagctgcag

SEQ ID NO: 23320 - DNA, 26 bp, Homo sapiens
ggtcgtagctgtcgtgcagctgcagg

SEQ ID NO: 23321 - DNA, 26 bp, Homo sapiens
gtcgtagctgtcgtgcagctgcaggt

SEQ ID NO: 23322 - DNA, 26 bp, Homo sapiens
tcgtagctgtcgtgcagctgcaggtg

SEQ ID NO: 23323 - DNA, 26 bp, Homo sapiens
cgtagctgtcgtgcagctgcaggtgc

SEQ ID NO: 23324 - DNA, 26 bp, Homo sapiens
gtagctgtcgtgcagctgcaggtgct

SEQ ID NO: 23325 - DNA, 26 bp, Homo sapiens
tagctgtcgtgcagctgcaggtgctg

SEQ ID NO: 23326 - DNA, 26 bp, Homo sapiens
agctgtcgtgcagctgcaggtgctgg

SEQ ID NO: 23327 - DNA, 26 bp, Homo sapiens
gctgtcgtgcagctgcaggtgctggc

SEQ ID NO: 23328 - DNA, 26 bp, Homo sapiens
ctgtcgtgcagctgcaggtgctggcc

SEQ ID NO: 23329 - DNA, 26 bp, Homo sapiens
tgtcgtgcagctgcaggtgctggccc

SEQ ID NO: 23330 - DNA, 26 bp, Homo sapiens
gtcgtgcagctgcaggtgctggccca

SEQ ID NO: 23331 - DNA, 26 bp, Homo sapiens
tcgtgcagctgcaggtgctggcccac

SEQ ID NO: 23332 - DNA, 26 bp, Homo sapiens
cgtgcagctgcaggtgctggcccacc

SEQ ID NO: 23333 - DNA, 26 bp, Homo sapiens
gtgcagctgcaggtgctggcccacct

SEQ ID NO: 23334 - DNA, 26 bp, Homo sapiens
tgcagctgcaggtgctggcccacctt

SEQ ID NO: 23335 - DNA, 26 bp, Homo sapiens
gcagctgcaggtgctggcccaccttg

SEQ ID NO: 23336 - DNA, 26 bp, Homo sapiens
cagctgcaggtgctggcccaccttgc

SEQ ID NO: 23337 - DNA, 26 bp, Homo sapiens
agctgcaggtgctggcccaccttgct

SEQ ID NO: 23338 - DNA, 26 bp, Homo sapiens
gctgcaggtgctggcccaccttgctg

SEQ ID NO: 23339 - DNA, 26 bp, Homo sapiens
ctgcaggtgctggcccaccttgctgc

SEQ ID NO: 23340 - DNA, 26 bp, Homo sapiens
tgcaggtgctggcccaccttgctgct

SEQ ID NO: 23341 - DNA, 26 bp, Homo sapiens
gcaggtgctggcccaccttgctgctc

SEQ ID NO: 23342 - DNA, 26 bp, Homo sapiens
caggtgctggcccaccttgctgctca

SEQ ID NO: 23343 - DNA, 26 bp, Homo sapiens
aggtgctggcccaccttgctgctcag

SEQ ID NO: 23344 - DNA, 26 bp, Homo sapiens
ggtgctggcccaccttgctgctcagg

SEQ ID NO: 23345 - DNA, 26 bp, Homo sapiens
gtgctggcccaccttgctgctcaggt

SEQ ID NO: 23346 - DNA, 26 bp, Homo sapiens
tgctggcccaccttgctgctcaggtc

SEQ ID NO: 23347 - DNA, 26 bp, Homo sapiens
gctggcccaccttgctgctcaggtcc

SEQ ID NO: 23348 - DNA, 26 bp, Homo sapiens
ctggcccaccttgctgctcaggtcca

SEQ ID NO: 23349 - DNA, 26 bp, Homo sapiens
tggcccaccttgctgctcaggtccac

SEQ ID NO: 23350 - DNA, 26 bp, Homo sapiens
ggcccaccttgctgctcaggtccacc

SEQ ID NO: 23351 - DNA, 26 bp, Homo sapiens
gcccaccttgctgctcaggtccaccc

SEQ ID NO: 23352 - DNA, 26 bp, Homo sapiens
cccaccttgctgctcaggtccaccca

SEQ ID NO: 23353 - DNA, 26 bp, Homo sapiens
ccaccttgctgctcaggtccacccat

SEQ ID NO: 23354 - DNA, 26 bp, Homo sapiens
caccttgctgctcaggtccacccatt

SEQ ID NO: 23355 - DNA, 26 bp, Homo sapiens
accttgctgctcaggtccacccattt

SEQ ID NO: 23356 - DNA, 26 bp, Homo sapiens
ccttgctgctcaggtccacccatttg

SEQ ID NO: 23357 - DNA, 26 bp, Homo sapiens
cttgctgctcaggtccacccatttgc

SEQ ID NO: 23358 - DNA, 26 bp, Homo sapiens
ttgctgctcaggtccacccatttgcc

SEQ ID NO: 23359 - DNA, 26 bp, Homo sapiens
tgctgctcaggtccacccatttgccc

SEQ ID NO: 23360 - DNA, 26 bp, Homo sapiens
gctgctcaggtccacccatttgccct

SEQ ID NO: 23361 - DNA, 26 bp, Homo sapiens
ctgctcaggtccacccatttgccctt

SEQ ID NO: 23362 - DNA, 26 bp, Homo sapiens
tgctcaggtccacccatttgcccttg

SEQ ID NO: 23363 - DNA, 26 bp, Homo sapiens
gctcaggtccacccatttgcccttga

SEQ ID NO: 23364 - DNA, 26 bp, Homo sapiens
ctcaggtccacccatttgcccttgaa

SEQ ID NO: 23365 - DNA, 26 bp, Homo sapiens
tcaggtccacccatttgcccttgaac

SEQ ID NO: 23366 - DNA, 26 bp, Homo sapiens
caggtccacccatttgcccttgaacc

SEQ ID NO: 23367 - DNA, 26 bp, Homo sapiens
aggtccacccatttgcccttgaacca

SEQ ID NO: 23368 - DNA, 26 bp, Homo sapiens
ggtccacccatttgcccttgaaccac

SEQ ID NO: 23369 - DNA, 26 bp, Homo sapiens
gtccacccatttgcccttgaaccact

SEQ ID NO: 23370 - DNA, 26 bp, Homo sapiens
tccacccatttgcccttgaaccactt

SEQ ID NO: 23371 - DNA, 26 bp, Homo sapiens
ccacccatttgcccttgaaccacttg

SEQ ID NO: 23372 - DNA, 26 bp, Homo sapiens
cacccatttgcccttgaaccacttga

SEQ ID NO: 23373 - DNA, 26 bp, Homo sapiens
acccatttgcccttgaaccacttgac

SEQ ID NO: 23374 - DNA, 26 bp, Homo sapiens
cccatttgcccttgaaccacttgacc

SEQ ID NO: 23375 - DNA, 26 bp, Homo sapiens
ccatttgcccttgaaccacttgacca

SEQ ID NO: 23376 - DNA, 26 bp, Homo sapiens
catttgcccttgaaccacttgaccac

SEQ ID NO: 23377 - DNA, 26 bp, Homo sapiens
atttgcccttgaaccacttgaccaca

SEQ ID NO: 23378 - DNA, 26 bp, Homo sapiens
tttgcccttgaaccacttgaccacag

SEQ ID NO: 23379 - DNA, 26 bp, Homo sapiens
ttgcccttgaaccacttgaccacagg

SEQ ID NO: 23380 - DNA, 26 bp, Homo sapiens
tgcccttgaaccacttgaccacaggc

SEQ ID NO: 23381 - DNA, 26 bp, Homo sapiens
gcccttgaaccacttgaccacaggcg

SEQ ID NO: 23382 - DNA, 26 bp, Homo sapiens
cccttgaaccacttgaccacaggcgg

SEQ ID NO: 23383 - DNA, 26 bp, Homo sapiens
ccttgaaccacttgaccacaggcggc

SEQ ID NO: 23384 - DNA, 26 bp, Homo sapiens
cttgaaccacttgaccacaggcggct

SEQ ID NO: 23385 - DNA, 26 bp, Homo sapiens
ttgaaccacttgaccacaggcggctt

SEQ ID NO: 23386 - DNA, 26 bp, Homo sapiens
tgaaccacttgaccacaggcggcttc

SEQ ID NO: 23387 - DNA, 26 bp, Homo sapiens
gaaccacttgaccacaggcggcttca

SEQ ID NO: 23388 - DNA, 26 bp, Homo sapiens
aaccacttgaccacaggcggcttcag

SEQ ID NO: 23389 - DNA, 26 bp, Homo sapiens
accacttgaccacaggcggcttcagg

SEQ ID NO: 23390 - DNA, 26 bp, Homo sapiens
ccacttgaccacaggcggcttcagga

SEQ ID NO: 23391 - DNA, 26 bp, Homo sapiens
cacttgaccacaggcggcttcaggag

SEQ ID NO: 23392 - DNA, 26 bp, Homo sapiens
acttgaccacaggcggcttcaggagg

SEQ ID NO: 23393 - DNA, 26 bp, Homo sapiens
cttgaccacaggcggcttcaggaggc

SEQ ID NO: 23394 - DNA, 26 bp, Homo sapiens
ttgaccacaggcggcttcaggaggct

SEQ ID NO: 23395 - DNA, 26 bp, Homo sapiens
tgaccacaggcggcttcaggaggctg

SEQ ID NO: 23396 - DNA, 26 bp, Homo sapiens
gaccacaggcggcttcaggaggctgg

SEQ ID NO: 23397 - DNA, 26 bp, Homo sapiens
accacaggcggcttcaggaggctggc

SEQ ID NO: 23398 - DNA, 26 bp, Homo sapiens
ccacaggcggcttcaggaggctggcg

SEQ ID NO: 23399 - DNA, 26 bp, Homo sapiens
cacaggcggcttcaggaggctggcgc

SEQ ID NO: 23400 - DNA, 26 bp, Homo sapiens
acaggcggcttcaggaggctggcgcc

SEQ ID NO: 23401 - DNA, 26 bp, Homo sapiens
caggcggcttcaggaggctggcgccg

SEQ ID NO: 23402 - DNA, 26 bp, Homo sapiens
aggcggcttcaggaggctggcgccgg

SEQ ID NO: 23403 - DNA, 26 bp, Homo sapiens
ggcggcttcaggaggctggcgccggc

SEQ ID NO: 23404 - DNA, 26 bp, Homo sapiens
gcggcttcaggaggctggcgccggcc

SEQ ID NO: 23405 - DNA, 26 bp, Homo sapiens
cggcttcaggaggctggcgccggcca

SEQ ID NO: 23406 - DNA, 26 bp, Homo sapiens
ggcttcaggaggctggcgccggccac

SEQ ID NO: 23407 - DNA, 26 bp, Homo sapiens
gcttcaggaggctggcgccggccacg

SEQ ID NO: 23408 - DNA, 26 bp, Homo sapiens
cttcaggaggctggcgccggccacgc

SEQ ID NO: 23409 - DNA, 26 bp, Homo sapiens
ttcaggaggctggcgccggccacgcg

SEQ ID NO: 23410 - DNA, 26 bp, Homo sapiens
tcaggaggctggcgccggccacgcgg

SEQ ID NO: 23411 - DNA, 26 bp, Homo sapiens
caggaggctggcgccggccacgcggg

SEQ ID NO: 23412 - DNA, 26 bp, Homo sapiens
aggaggctggcgccggccacgcgggc

SEQ ID NO: 23413 - DNA, 26 bp, Homo sapiens
ggaggctggcgccggccacgcgggct

SEQ ID NO: 23414 - DNA, 26 bp, Homo sapiens
gaggctggcgccggccacgcgggctg

SEQ ID NO: 23415 - DNA, 26 bp, Homo sapiens
aggctggcgccggccacgcgggctga

SEQ ID NO: 23416 - DNA, 26 bp, Homo sapiens
ggctggcgccggccacgcgggctgag

SEQ ID NO: 23417 - DNA, 26 bp, Homo sapiens
gctggcgccggccacgcgggctgaga

SEQ ID NO: 23418 - DNA, 26 bp, Homo sapiens
ctggcgccggccacgcgggctgagaa

SEQ ID NO: 23419 - DNA, 26 bp, Homo sapiens
tggcgccggccacgcgggctgagaag

SEQ ID NO: 23420 - DNA, 26 bp, Homo sapiens
ggcgccggccacgcgggctgagaagg

SEQ ID NO: 23421 - DNA, 26 bp, Homo sapiens
gcgccggccacgcgggctgagaaggt

SEQ ID NO: 23422 - DNA, 26 bp, Homo sapiens
cgccggccacgcgggctgagaaggtg

SEQ ID NO: 23423 - DNA, 26 bp, Homo sapiens
gccggccacgcgggctgagaaggtga

SEQ ID NO: 23424 - DNA, 26 bp, Homo sapiens
ccggccacgcgggctgagaaggtgat

SEQ ID NO: 23425 - DNA, 26 bp, Homo sapiens
cggccacgcgggctgagaaggtgatg

SEQ ID NO: 23426 - DNA, 26 bp, Homo sapiens
ggccacgcgggctgagaaggtgatgc

SEQ ID NO: 23427 - DNA, 26 bp, Homo sapiens
gccacgcgggctgagaaggtgatgct

SEQ ID NO: 23428 - DNA, 26 bp, Homo sapiens
ccacgcgggctgagaaggtgatgctg

SEQ ID NO: 23429 - DNA, 26 bp, Homo sapiens
cacgcgggctgagaaggtgatgctgc

SEQ ID NO: 23430 - DNA, 26 bp, Homo sapiens
acgcgggctgagaaggtgatgctgcc

SEQ ID NO: 23431 - DNA, 26 bp, Homo sapiens
cgcgggctgagaaggtgatgctgcca

SEQ ID NO: 23432 - DNA, 26 bp, Homo sapiens
gcgggctgagaaggtgatgctgccac

SEQ ID NO: 23433 - DNA, 26 bp, Homo sapiens
cgggctgagaaggtgatgctgccacc

SEQ ID NO: 23434 - DNA, 26 bp, Homo sapiens
gggctgagaaggtgatgctgccaccc

SEQ ID NO: 23435 - DNA, 26 bp, Homo sapiens
ggctgagaaggtgatgctgccaccca

SEQ ID NO: 23436 - DNA, 26 bp, Homo sapiens
gctgagaaggtgatgctgccacccac

SEQ ID NO: 23437 - DNA, 26 bp, Homo sapiens
ctgagaaggtgatgctgccacccacg

SEQ ID NO: 23438 - DNA, 26 bp, Homo sapiens
tgagaaggtgatgctgccacccacgg

SEQ ID NO: 23439 - DNA, 26 bp, Homo sapiens
gagaaggtgatgctgccacccacggt

SEQ ID NO: 23440 - DNA, 26 bp, Homo sapiens
agaaggtgatgctgccacccacggtc

SEQ ID NO: 23441 - DNA, 26 bp, Homo sapiens
gaaggtgatgctgccacccacggtca

SEQ ID NO: 23442 - DNA, 26 bp, Homo sapiens
aaggtgatgctgccacccacggtcac

SEQ ID NO: 23443 - DNA, 26 bp, Homo sapiens
aggtgatgctgccacccacggtcacc

SEQ ID NO: 23444 - DNA, 26 bp, Homo sapiens
ggtgatgctgccacccacggtcacct

SEQ ID NO: 23445 - DNA, 26 bp, Homo sapiens
gtgatgctgccacccacggtcacctc

SEQ ID NO: 23446 - DNA, 26 bp, Homo sapiens
tgatgctgccacccacggtcacctcg

SEQ ID NO: 23447 - DNA, 26 bp, Homo sapiens
gatgctgccacccacggtcacctcgc

SEQ ID NO: 23448 - DNA, 26 bp, Homo sapiens
atgctgccacccacggtcacctcgcc

SEQ ID NO: 23449 - DNA, 26 bp, Homo sapiens
tgctgccacccacggtcacctcgcca

SEQ ID NO: 23450 - DNA, 26 bp, Homo sapiens
gctgccacccacggtcacctcgccat

SEQ ID NO: 23451 - DNA, 26 bp, Homo sapiens
ctgccacccacggtcacctcgccatc

SEQ ID NO: 23452 - DNA, 26 bp, Homo sapiens
tgccacccacggtcacctcgccatcc

SEQ ID NO: 23453 - DNA, 26 bp, Homo sapiens
gccacccacggtcacctcgccatcct

SEQ ID NO: 23454 - DNA, 26 bp, Homo sapiens
ccacccacggtcacctcgccatcctg

SEQ ID NO: 23455 - DNA, 26 bp, Homo sapiens
cacccacggtcacctcgccatcctgt

SEQ ID NO: 23456 - DNA, 26 bp, Homo sapiens
acccacggtcacctcgccatcctgtg

SEQ ID NO: 23457 - DNA, 26 bp, Homo sapiens
cccacggtcacctcgccatcctgtgg

SEQ ID NO: 23458 - DNA, 26 bp, Homo sapiens
ccacggtcacctcgccatcctgtggc

SEQ ID NO: 23459 - DNA, 26 bp, Homo sapiens
cacggtcacctcgccatcctgtggcc

SEQ ID NO: 23460 - DNA, 26 bp, Homo sapiens
acggtcacctcgccatcctgtggccg

SEQ ID NO: 23461 - DNA, 26 bp, Homo sapiens
cggtcacctcgccatcctgtggccgc

SEQ ID NO: 23462 - DNA, 26 bp, Homo sapiens
ggtcacctcgccatcctgtggccgca

SEQ ID NO: 23463 - DNA, 26 bp, Homo sapiens
gtcacctcgccatcctgtggccgcat

SEQ ID NO: 23464 - DNA, 26 bp, Homo sapiens
tcacctcgccatcctgtggccgcatc

SEQ ID NO: 23465 - DNA, 26 bp, Homo sapiens
cacctcgccatcctgtggccgcatca

SEQ ID NO: 23466 - DNA, 26 bp, Homo sapiens
acctcgccatcctgtggccgcatcac

SEQ ID NO: 23467 - DNA, 26 bp, Homo sapiens
cctcgccatcctgtggccgcatcacg

SEQ ID NO: 23468 - DNA, 26 bp, Homo sapiens
ctcgccatcctgtggccgcatcacga

SEQ ID NO: 23469 - DNA, 26 bp, Homo sapiens
tcgccatcctgtggccgcatcacgaa

SEQ ID NO: 23470 - DNA, 26 bp, Homo sapiens
cgccatcctgtggccgcatcacgaag

SEQ ID NO: 23471 - DNA, 26 bp, Homo sapiens
gccatcctgtggccgcatcacgaaga

SEQ ID NO: 23472 - DNA, 26 bp, Homo sapiens
ccatcctgtggccgcatcacgaagag

SEQ ID NO: 23473 - DNA, 26 bp, Homo sapiens
catcctgtggccgcatcacgaagagg

SEQ ID NO: 23474 - DNA, 26 bp, Homo sapiens
atcctgtggccgcatcacgaagaggc

SEQ ID NO: 23475 - DNA, 26 bp, Homo sapiens
tcctgtggccgcatcacgaagaggcc

SEQ ID NO: 23476 - DNA, 26 bp, Homo sapiens
cctgtggccgcatcacgaagaggcca

SEQ ID NO: 23477 - DNA, 26 bp, Homo sapiens
ctgtggccgcatcacgaagaggccaa

SEQ ID NO: 23478 - DNA, 26 bp, Homo sapiens
tgtggccgcatcacgaagaggccaat

SEQ ID NO: 23479 - DNA, 26 bp, Homo sapiens
gtggccgcatcacgaagaggccaatg

SEQ ID NO: 23480 - DNA, 26 bp, Homo sapiens
tggccgcatcacgaagaggccaatgg

SEQ ID NO: 23481 - DNA, 26 bp, Homo sapiens
ggccgcatcacgaagaggccaatggg

SEQ ID NO: 23482 - DNA, 26 bp, Homo sapiens
gccgcatcacgaagaggccaatgggg

SEQ ID NO: 23483 - DNA, 26 bp, Homo sapiens
ccgcatcacgaagaggccaatggggt

SEQ ID NO: 23484 - DNA, 26 bp, Homo sapiens
cgcatcacgaagaggccaatggggtc

SEQ ID NO: 23485 - DNA, 26 bp, Homo sapiens
gcatcacgaagaggccaatggggtca

SEQ ID NO: 23486 - DNA, 26 bp, Homo sapiens
catcacgaagaggccaatggggtcat

SEQ ID NO: 23487 - DNA, 26 bp, Homo sapiens
atcacgaagaggccaatggggtcatc

SEQ ID NO: 23488 - DNA, 26 bp, Homo sapiens
tcacgaagaggccaatggggtcatcg

SEQ ID NO: 23489 - DNA, 26 bp, Homo sapiens
cacgaagaggccaatggggtcatcgg

SEQ ID NO: 23490 - DNA, 26 bp, Homo sapiens
acgaagaggccaatggggtcatcggg

SEQ ID NO: 23491 - DNA, 26 bp, Homo sapiens
cgaagaggccaatggggtcatcgggg

SEQ ID NO: 23492 - DNA, 26 bp, Homo sapiens
gaagaggccaatggggtcatcggggg

SEQ ID NO: 23493 - DNA, 26 bp, Homo sapiens
aagaggccaatggggtcatcgggggc

SEQ ID NO: 23494 - DNA, 26 bp, Homo sapiens
agaggccaatggggtcatcgggggct

SEQ ID NO: 23495 - DNA, 26 bp, Homo sapiens
gaggccaatggggtcatcgggggctc

SEQ ID NO: 23496 - DNA, 26 bp, Homo sapiens
aggccaatggggtcatcgggggctcc

SEQ ID NO: 23497 - DNA, 26 bp, Homo sapiens
ggccaatggggtcatcgggggctcca

SEQ ID NO: 23498 - DNA, 26 bp, Homo sapiens
gccaatggggtcatcgggggctccag

SEQ ID NO: 23499 - DNA, 26 bp, Homo sapiens
ccaatggggtcatcgggggctccagg

SEQ ID NO: 23500 - DNA, 26 bp, Homo sapiens
caatggggtcatcgggggctccaggg

SEQ ID NO: 23501 - DNA, 26 bp, Homo sapiens
aatggggtcatcgggggctccagggg

SEQ ID NO: 23502 - DNA, 26 bp, Homo sapiens
atggggtcatcgggggctccaggggt

SEQ ID NO: 23503 - DNA, 26 bp, Homo sapiens
tggggtcatcgggggctccaggggta

SEQ ID NO: 23504 - DNA, 26 bp, Homo sapiens
ggggtcatcgggggctccaggggtag

SEQ ID NO: 23505 - DNA, 26 bp, Homo sapiens
gggtcatcgggggctccaggggtagg

SEQ ID NO: 23506 - DNA, 26 bp, Homo sapiens
ggtcatcgggggctccaggggtagga

SEQ ID NO: 23507 - DNA, 26 bp, Homo sapiens
gtcatcgggggctccaggggtaggac

SEQ ID NO: 23508 - DNA, 26 bp, Homo sapiens
tcatcgggggctccaggggtaggacc

SEQ ID NO: 23509 - DNA, 26 bp, Homo sapiens
catcgggggctccaggggtaggacca

SEQ ID NO: 23510 - DNA, 26 bp, Homo sapiens
atcgggggctccaggggtaggaccat

SEQ ID NO: 23511 - DNA, 26 bp, Homo sapiens
tcgggggctccaggggtaggaccatt

SEQ ID NO: 23512 - DNA, 26 bp, Homo sapiens
cgggggctccaggggtaggaccattg

SEQ ID NO: 23513 - DNA, 26 bp, Homo sapiens
gggggctccaggggtaggaccattga

SEQ ID NO: 23514 - DNA, 26 bp, Homo sapiens
ggggctccaggggtaggaccattgag

SEQ ID NO: 23515 - DNA, 26 bp, Homo sapiens
gggctccaggggtaggaccattgaga

SEQ ID NO: 23516 - DNA, 26 bp, Homo sapiens
ggctccaggggtaggaccattgagag

SEQ ID NO: 23517 - DNA, 26 bp, Homo sapiens
gctccaggggtaggaccattgagagc

SEQ ID NO: 23518 - DNA, 26 bp, Homo sapiens
ctccaggggtaggaccattgagagct

SEQ ID NO: 23519 - DNA, 26 bp, Homo sapiens
tccaggggtaggaccattgagagctg

SEQ ID NO: 23520 - DNA, 26 bp, Homo sapiens
ccaggggtaggaccattgagagctgc

SEQ ID NO: 23521 - DNA, 26 bp, Homo sapiens
caggggtaggaccattgagagctgct

SEQ ID NO: 23522 - DNA, 26 bp, Homo sapiens
aggggtaggaccattgagagctgctg

SEQ ID NO: 23523 - DNA, 26 bp, Homo sapiens
ggggtaggaccattgagagctgctga

SEQ ID NO: 23524 - DNA, 26 bp, Homo sapiens
gggtaggaccattgagagctgctgag

SEQ ID NO: 23525 - DNA, 26 bp, Homo sapiens
ggtaggaccattgagagctgctgagc

SEQ ID NO: 23526 - DNA, 26 bp, Homo sapiens
gtaggaccattgagagctgctgagct

SEQ ID NO: 23527 - DNA, 26 bp, Homo sapiens
taggaccattgagagctgctgagctt

SEQ ID NO: 23528 - DNA, 26 bp, Homo sapiens
aggaccattgagagctgctgagcttg

SEQ ID NO: 23529 - DNA, 26 bp, Homo sapiens
ggaccattgagagctgctgagcttga

SEQ ID NO: 23530 - DNA, 26 bp, Homo sapiens
gaccattgagagctgctgagcttgac

SEQ ID NO: 23531 - DNA, 26 bp, Homo sapiens
accattgagagctgctgagcttgacc

SEQ ID NO: 23532 - DNA, 26 bp, Homo sapiens
ccattgagagctgctgagcttgaccc

SEQ ID NO: 23533 - DNA, 26 bp, Homo sapiens
cattgagagctgctgagcttgaccct

SEQ ID NO: 23534 - DNA, 26 bp, Homo sapiens
attgagagctgctgagcttgaccctt

SEQ ID NO: 23535 - DNA, 26 bp, Homo sapiens
ttgagagctgctgagcttgacccttt

SEQ ID NO: 23536 - DNA, 26 bp, Homo sapiens
tgagagctgctgagcttgaccctttg

SEQ ID NO: 23537 - DNA, 26 bp, Homo sapiens
gagagctgctgagcttgaccctttgg

SEQ ID NO: 23538 - DNA, 26 bp, Homo sapiens
agagctgctgagcttgaccctttggg

SEQ ID NO: 23539 - DNA, 26 bp, Homo sapiens
gagctgctgagcttgaccctttggga

SEQ ID NO: 23540 - DNA, 26 bp, Homo sapiens
agctgctgagcttgaccctttgggac

SEQ ID NO: 23541 - DNA, 26 bp, Homo sapiens
gctgctgagcttgaccctttgggact

SEQ ID NO: 23542 - DNA, 26 bp, Homo sapiens
ctgctgagcttgaccctttgggactt

SEQ ID NO: 23543 - DNA, 26 bp, Homo sapiens
tgctgagcttgaccctttgggacttg

SEQ ID NO: 23544 - DNA, 26 bp, Homo sapiens
gctgagcttgaccctttgggacttgg

SEQ ID NO: 23545 - DNA, 26 bp, Homo sapiens
ctgagcttgaccctttgggacttggg

SEQ ID NO: 23546 - DNA, 26 bp, Homo sapiens
tgagcttgaccctttgggacttgggg

SEQ ID NO: 23547 - DNA, 26 bp, Homo sapiens
gagcttgaccctttgggacttggggc

SEQ ID NO: 23548 - DNA, 26 bp, Homo sapiens
agcttgaccctttgggacttggggca

SEQ ID NO: 23549 - DNA, 26 bp, Homo sapiens
gcttgaccctttgggacttggggcac

SEQ ID NO: 23550 - DNA, 26 bp, Homo sapiens
cttgaccctttgggacttggggcact

SEQ ID NO: 23551 - DNA, 26 bp, Homo sapiens
ttgaccctttgggacttggggcactt

SEQ ID NO: 23552 - DNA, 26 bp, Homo sapiens
tgaccctttgggacttggggcacttt

SEQ ID NO: 23553 - DNA, 26 bp, Homo sapiens
gaccctttgggacttggggcactttc

SEQ ID NO: 23554 - DNA, 26 bp, Homo sapiens
accctttgggacttggggcactttct

SEQ ID NO: 23555 - DNA, 26 bp, Homo sapiens
ccctttgggacttggggcactttctc

SEQ ID NO: 23556 - DNA, 26 bp, Homo sapiens
cctttgggacttggggcactttctcc

SEQ ID NO: 23557 - DNA, 26 bp, Homo sapiens
ctttgggacttggggcactttctccc

SEQ ID NO: 23558 - DNA, 26 bp, Homo sapiens
tttgggacttggggcactttctccca

SEQ ID NO: 23559 - DNA, 26 bp, Homo sapiens
ttgggacttggggcactttctcccag

SEQ ID NO: 23560 - DNA, 26 bp, Homo sapiens
tgggacttggggcactttctcccagc

SEQ ID NO: 23561 - DNA, 26 bp, Homo sapiens
gggacttggggcactttctcccagct

SEQ ID NO: 23562 - DNA, 26 bp, Homo sapiens
ggacttggggcactttctcccagctc

SEQ ID NO: 23563 - DNA, 26 bp, Homo sapiens
gacttggggcactttctcccagctca

SEQ ID NO: 23564 - DNA, 26 bp, Homo sapiens
acttggggcactttctcccagctcag

SEQ ID NO: 23565 - DNA, 26 bp, Homo sapiens
cttggggcactttctcccagctcagc

SEQ ID NO: 23566 - DNA, 26 bp, Homo sapiens
ttggggcactttctcccagctcagcg

SEQ ID NO: 23567 - DNA, 26 bp, Homo sapiens
tggggcactttctcccagctcagcgg

SEQ ID NO: 23568 - DNA, 26 bp, Homo sapiens
ggggcactttctcccagctcagcggc

SEQ ID NO: 23569 - DNA, 26 bp, Homo sapiens
gggcactttctcccagctcagcggct

SEQ ID NO: 23570 - DNA, 26 bp, Homo sapiens
ggcactttctcccagctcagcggctg

SEQ ID NO: 23571 - DNA, 26 bp, Homo sapiens
gcactttctcccagctcagcggctgg

SEQ ID NO: 23572 - DNA, 26 bp, Homo sapiens
cactttctcccagctcagcggctggg

SEQ ID NO: 23573 - DNA, 26 bp, Homo sapiens
actttctcccagctcagcggctgggg

SEQ ID NO: 23574 - DNA, 26 bp, Homo sapiens
ctttctcccagctcagcggctggggc

SEQ ID NO: 23575 - DNA, 26 bp, Homo sapiens
tttctcccagctcagcggctggggcc

SEQ ID NO: 23576 - DNA, 26 bp, Homo sapiens
ttctcccagctcagcggctggggccg

SEQ ID NO: 23577 - DNA, 26 bp, Homo sapiens
tctcccagctcagcggctggggccgg

SEQ ID NO: 23578 - DNA, 26 bp, Homo sapiens
ctcccagctcagcggctggggccggg

SEQ ID NO: 23579 - DNA, 26 bp, Homo sapiens
tcccagctcagcggctggggccgggg

SEQ ID NO: 23580 - DNA, 26 bp, Homo sapiens
cccagctcagcggctggggccggggc

SEQ ID NO: 23581 - DNA, 26 bp, Homo sapiens
ccagctcagcggctggggccggggct

SEQ ID NO: 23582 - DNA, 26 bp, Homo sapiens
cagctcagcggctggggccggggctt

SEQ ID NO: 23583 - DNA, 26 bp, Homo sapiens
agctcagcggctggggccggggcttc

SEQ ID NO: 23584 - DNA, 26 bp, Homo sapiens
gctcagcggctggggccggggcttct

SEQ ID NO: 23585 - DNA, 26 bp, Homo sapiens
ctcagcggctggggccggggcttctc

SEQ ID NO: 23586 - DNA, 26 bp, Homo sapiens
tcagcggctggggccggggcttctcc

SEQ ID NO: 23587 - DNA, 26 bp, Homo sapiens
cagcggctggggccggggcttctcca

SEQ ID NO: 23588 - DNA, 26 bp, Homo sapiens
agcggctggggccggggcttctccag

SEQ ID NO: 23589 - DNA, 26 bp, Homo sapiens
gcggctggggccggggcttctccagg

SEQ ID NO: 23590 - DNA, 26 bp, Homo sapiens
cggctggggccggggcttctccaggg

SEQ ID NO: 23591 - DNA, 26 bp, Homo sapiens
ggctggggccggggcttctccagggg

SEQ ID NO: 23592 - DNA, 26 bp, Homo sapiens
gctggggccggggcttctccaggggc

SEQ ID NO: 23593 - DNA, 26 bp, Homo sapiens
ctggggccggggcttctccaggggct

SEQ ID NO: 23594 - DNA, 26 bp, Homo sapiens
tggggccggggcttctccaggggctc

SEQ ID NO: 23595 - DNA, 26 bp, Homo sapiens
ggggccggggcttctccaggggctcc

SEQ ID NO: 23596 - DNA, 26 bp, Homo sapiens
gggccggggcttctccaggggctcca

SEQ ID NO: 23597 - DNA, 26 bp, Homo sapiens
ggccggggcttctccaggggctccag

SEQ ID NO: 23598 - DNA, 26 bp, Homo sapiens
gccggggcttctccaggggctccagt

SEQ ID NO: 23599 - DNA, 26 bp, Homo sapiens
ccggggcttctccaggggctccagtg

SEQ ID NO: 23600 - DNA, 26 bp, Homo sapiens
cggggcttctccaggggctccagtgg

SEQ ID NO: 23601 - DNA, 26 bp, Homo sapiens
ggggcttctccaggggctccagtggc

SEQ ID NO: 23602 - DNA, 26 bp, Homo sapiens
gggcttctccaggggctccagtggcc

SEQ ID NO: 23603 - DNA, 26 bp, Homo sapiens
ggcttctccaggggctccagtggcct

SEQ ID NO: 23604 - DNA, 26 bp, Homo sapiens
gcttctccaggggctccagtggcctc

SEQ ID NO: 23605 - DNA, 26 bp, Homo sapiens
cttctccaggggctccagtggcctca

SEQ ID NO: 23606 - DNA, 26 bp, Homo sapiens
ttctccaggggctccagtggcctcag

SEQ ID NO: 23607 - DNA, 26 bp, Homo sapiens
tctccaggggctccagtggcctcagc

SEQ ID NO: 23608 - DNA, 26 bp, Homo sapiens
ctccaggggctccagtggcctcagca

SEQ ID NO: 23609 - DNA, 26 bp, Homo sapiens
tccaggggctccagtggcctcagcag

SEQ ID NO: 23610 - DNA, 26 bp, Homo sapiens
ccaggggctccagtggcctcagcagg

SEQ ID NO: 23611 - DNA, 26 bp, Homo sapiens
caggggctccagtggcctcagcaggg

SEQ ID NO: 23612 - DNA, 26 bp, Homo sapiens
aggggctccagtggcctcagcagggg

SEQ ID NO: 23613 - DNA, 26 bp, Homo sapiens
ggggctccagtggcctcagcaggggc

SEQ ID NO: 23614 - DNA, 26 bp, Homo sapiens
gggctccagtggcctcagcaggggca

SEQ ID NO: 23615 - DNA, 26 bp, Homo sapiens
ggctccagtggcctcagcaggggcag

SEQ ID NO: 23616 - DNA, 26 bp, Homo sapiens
gctccagtggcctcagcaggggcagg

SEQ ID NO: 23617 - DNA, 26 bp, Homo sapiens
ctccagtggcctcagcaggggcaggg

SEQ ID NO: 23618 - DNA, 26 bp, Homo sapiens
tccagtggcctcagcaggggcagggg

SEQ ID NO: 23619 - DNA, 26 bp, Homo sapiens
ccagtggcctcagcaggggcaggggc

SEQ ID NO: 23620 - DNA, 26 bp, Homo sapiens
cagtggcctcagcaggggcaggggca

SEQ ID NO: 23621 - DNA, 26 bp, Homo sapiens
agtggcctcagcaggggcaggggcag

SEQ ID NO: 23622 - DNA, 26 bp, Homo sapiens
gtggcctcagcaggggcaggggcagg

SEQ ID NO: 23623 - DNA, 26 bp, Homo sapiens
tggcctcagcaggggcaggggcaggg

SEQ ID NO: 23624 - DNA, 26 bp, Homo sapiens
ggcctcagcaggggcaggggcagggg

SEQ ID NO: 23625 - DNA, 26 bp, Homo sapiens
gcctcagcaggggcaggggcaggggc

SEQ ID NO: 23626 - DNA, 26 bp, Homo sapiens
cctcagcaggggcaggggcaggggcc

SEQ ID NO: 23627 - DNA, 26 bp, Homo sapiens
ctcagcaggggcaggggcaggggcca

SEQ ID NO: 23628 - DNA, 26 bp, Homo sapiens
tcagcaggggcaggggcaggggccag

SEQ ID NO: 23629 - DNA, 26 bp, Homo sapiens
cagcaggggcaggggcaggggccagc

SEQ ID NO: 23630 - DNA, 26 bp, Homo sapiens
agcaggggcaggggcaggggccagca

SEQ ID NO: 23631 - DNA, 26 bp, Homo sapiens
gcaggggcaggggcaggggccagcat

SEQ ID NO: 23632 - DNA, 26 bp, Homo sapiens
caggggcaggggcaggggccagcatg

SEQ ID NO: 23633 - DNA, 26 bp, Homo sapiens
aggggcaggggcaggggccagcatgg

SEQ ID NO: 23634 - DNA, 26 bp, Homo sapiens
ggggcaggggcaggggccagcatggg

SEQ ID NO: 23635 - DNA, 26 bp, Homo sapiens
gggcaggggcaggggccagcatgggc

SEQ ID NO: 23636 - DNA, 26 bp, Homo sapiens
ggcaggggcaggggccagcatgggct

SEQ ID NO: 23637 - DNA, 26 bp, Homo sapiens
gcaggggcaggggccagcatgggctc

SEQ ID NO: 23638 - DNA, 26 bp, Homo sapiens
caggggcaggggccagcatgggctct

SEQ ID NO: 23639 - DNA, 26 bp, Homo sapiens
aggggcaggggccagcatgggctctg

SEQ ID NO: 23640 - DNA, 26 bp, Homo sapiens
ggggcaggggccagcatgggctctgc

SEQ ID NO: 23641 - DNA, 26 bp, Homo sapiens
gggcaggggccagcatgggctctgcc

SEQ ID NO: 23642 - DNA, 26 bp, Homo sapiens
ggcaggggccagcatgggctctgcct

SEQ ID NO: 23643 - DNA, 26 bp, Homo sapiens
gcaggggccagcatgggctctgcctt

SEQ ID NO: 23644 - DNA, 26 bp, Homo sapiens
caggggccagcatgggctctgccttc

SEQ ID NO: 23645 - DNA, 26 bp, Homo sapiens
aggggccagcatgggctctgccttct

SEQ ID NO: 23646 - DNA, 26 bp, Homo sapiens
ggggccagcatgggctctgccttctc

SEQ ID NO: 23647 - DNA, 26 bp, Homo sapiens
gggccagcatgggctctgccttctct

SEQ ID NO: 23648 - DNA, 26 bp, Homo sapiens
ggccagcatgggctctgccttctctg

SEQ ID NO: 23649 - DNA, 26 bp, Homo sapiens
gccagcatgggctctgccttctctgc

SEQ ID NO: 23650 - DNA, 26 bp, Homo sapiens
ccagcatgggctctgccttctctgcc

SEQ ID NO: 23651 - DNA, 26 bp, Homo sapiens
cagcatgggctctgccttctctgcct

SEQ ID NO: 23652 - DNA, 26 bp, Homo sapiens
agcatgggctctgccttctctgcctc

SEQ ID NO: 23653 - DNA, 26 bp, Homo sapiens
gcatgggctctgccttctctgcctct

SEQ ID NO: 23654 - DNA, 26 bp, Homo sapiens
catgggctctgccttctctgcctcta

SEQ ID NO: 23655 - DNA, 26 bp, Homo sapiens
atgggctctgccttctctgcctctat

SEQ ID NO: 23656 - DNA, 26 bp, Homo sapiens
tgggctctgccttctctgcctctatg

SEQ ID NO: 23657 - DNA, 26 bp, Homo sapiens
gggctctgccttctctgcctctatga

SEQ ID NO: 23658 - DNA, 26 bp, Homo sapiens
ggctctgccttctctgcctctatgac

SEQ ID NO: 23659 - DNA, 26 bp, Homo sapiens
gctctgccttctctgcctctatgacc

SEQ ID NO: 23660 - DNA, 26 bp, Homo sapiens
ctctgccttctctgcctctatgacct

SEQ ID NO: 23661 - DNA, 26 bp, Homo sapiens
tctgccttctctgcctctatgacctt

SEQ ID NO: 23662 - DNA, 26 bp, Homo sapiens
ctgccttctctgcctctatgaccttg

SEQ ID NO: 23663 - DNA, 26 bp, Homo sapiens
tgccttctctgcctctatgaccttga

SEQ ID NO: 23664 - DNA, 26 bp, Homo sapiens
gccttctctgcctctatgaccttgag

SEQ ID NO: 23665 - DNA, 26 bp, Homo sapiens
ccttctctgcctctatgaccttgagg

SEQ ID NO: 23666 - DNA, 26 bp, Homo sapiens
cttctctgcctctatgaccttgaggt

SEQ ID NO: 23667 - DNA, 26 bp, Homo sapiens
ttctctgcctctatgaccttgaggtc

SEQ ID NO: 23668 - DNA, 26 bp, Homo sapiens
tctctgcctctatgaccttgaggtcg

SEQ ID NO: 23669 - DNA, 26 bp, Homo sapiens
ctctgcctctatgaccttgaggtcga

SEQ ID NO: 23670 - DNA, 26 bp, Homo sapiens
tctgcctctatgaccttgaggtcgaa

SEQ ID NO: 23671 - DNA, 26 bp, Homo sapiens
ctgcctctatgaccttgaggtcgaac

SEQ ID NO: 23672 - DNA, 26 bp, Homo sapiens
tgcctctatgaccttgaggtcgaact

SEQ ID NO: 23673 - DNA, 26 bp, Homo sapiens
gcctctatgaccttgaggtcgaactt

SEQ ID NO: 23674 - DNA, 26 bp, Homo sapiens
cctctatgaccttgaggtcgaacttg

SEQ ID NO: 23675 - DNA, 26 bp, Homo sapiens
ctctatgaccttgaggtcgaacttga

SEQ ID NO: 23676 - DNA, 26 bp, Homo sapiens
tctatgaccttgaggtcgaacttgac

SEQ ID NO: 23677 - DNA, 26 bp, Homo sapiens
ctatgaccttgaggtcgaacttgacc

SEQ ID NO: 23678 - DNA, 26 bp, Homo sapiens
tatgaccttgaggtcgaacttgacct

SEQ ID NO: 23679 - DNA, 26 bp, Homo sapiens
atgaccttgaggtcgaacttgacctt

SEQ ID NO: 23680 - DNA, 26 bp, Homo sapiens
tgaccttgaggtcgaacttgaccttg

SEQ ID NO: 23681 - DNA, 26 bp, Homo sapiens
gaccttgaggtcgaacttgaccttgg

SEQ ID NO: 23682 - DNA, 26 bp, Homo sapiens
accttgaggtcgaacttgaccttgga

SEQ ID NO: 23683 - DNA, 26 bp, Homo sapiens
ccttgaggtcgaacttgaccttggag

SEQ ID NO: 23684 - DNA, 26 bp, Homo sapiens
cttgaggtcgaacttgaccttggagg

SEQ ID NO: 23685 - DNA, 26 bp, Homo sapiens
ttgaggtcgaacttgaccttggagga

SEQ ID NO: 23686 - DNA, 26 bp, Homo sapiens
tgaggtcgaacttgaccttggaggag

SEQ ID NO: 23687 - DNA, 26 bp, Homo sapiens
gaggtcgaacttgaccttggaggagc

SEQ ID NO: 23688 - DNA, 26 bp, Homo sapiens
aggtcgaacttgaccttggaggagcc

SEQ ID NO: 23689 - DNA, 26 bp, Homo sapiens
ggtcgaacttgaccttggaggagcca

SEQ ID NO: 23690 - DNA, 26 bp, Homo sapiens
gtcgaacttgaccttggaggagccag

SEQ ID NO: 23691 - DNA, 26 bp, Homo sapiens
tcgaacttgaccttggaggagccagc

SEQ ID NO: 23692 - DNA, 26 bp, Homo sapiens
cgaacttgaccttggaggagccagca

SEQ ID NO: 23693 - DNA, 26 bp, Homo sapiens
gaacttgaccttggaggagccagcaa

SEQ ID NO: 23694 - DNA, 26 bp, Homo sapiens
aacttgaccttggaggagccagcaat

SEQ ID NO: 23695 - DNA, 26 bp, Homo sapiens
acttgaccttggaggagccagcaatg

SEQ ID NO: 23696 - DNA, 26 bp, Homo sapiens
cttgaccttggaggagccagcaatga

SEQ ID NO: 23697 - DNA, 26 bp, Homo sapiens
ttgaccttggaggagccagcaatgac

SEQ ID NO: 23698 - DNA, 26 bp, Homo sapiens
tgaccttggaggagccagcaatgact

SEQ ID NO: 23699 - DNA, 26 bp, Homo sapiens
gaccttggaggagccagcaatgactg

SEQ ID NO: 23700 - DNA, 26 bp, Homo sapiens
accttggaggagccagcaatgactgc

SEQ ID NO: 23701 - DNA, 26 bp, Homo sapiens
ccttggaggagccagcaatgactgcg

SEQ ID NO: 23702 - DNA, 26 bp, Homo sapiens
cttggaggagccagcaatgactgcgt

SEQ ID NO: 23703 - DNA, 26 bp, Homo sapiens
ttggaggagccagcaatgactgcgta

SEQ ID NO: 23704 - DNA, 26 bp, Homo sapiens
tggaggagccagcaatgactgcgtaa

SEQ ID NO: 23705 - DNA, 26 bp, Homo sapiens
ggaggagccagcaatgactgcgtaag

SEQ ID NO: 23706 - DNA, 26 bp, Homo sapiens
gaggagccagcaatgactgcgtaaga

SEQ ID NO: 23707 - DNA, 26 bp, Homo sapiens
aggagccagcaatgactgcgtaagat

SEQ ID NO: 23708 - DNA, 26 bp, Homo sapiens
ggagccagcaatgactgcgtaagatc

SEQ ID NO: 23709 - DNA, 26 bp, Homo sapiens
gagccagcaatgactgcgtaagatcc

SEQ ID NO: 23710 - DNA, 26 bp, Homo sapiens
agccagcaatgactgcgtaagatccc

SEQ ID NO: 23711 - DNA, 26 bp, Homo sapiens
gccagcaatgactgcgtaagatccct

SEQ ID NO: 23712 - DNA, 26 bp, Homo sapiens
ccagcaatgactgcgtaagatccctg

SEQ ID NO: 23713 - DNA, 26 bp, Homo sapiens
cagcaatgactgcgtaagatccctgg

SEQ ID NO: 23714 - DNA, 26 bp, Homo sapiens
agcaatgactgcgtaagatccctggt

SEQ ID NO: 23715 - DNA, 26 bp, Homo sapiens
gcaatgactgcgtaagatccctggtc

SEQ ID NO: 23716 - DNA, 26 bp, Homo sapiens
caatgactgcgtaagatccctggtcg

SEQ ID NO: 23717 - DNA, 26 bp, Homo sapiens
aatgactgcgtaagatccctggtcgg

SEQ ID NO: 23718 - DNA, 26 bp, Homo sapiens
atgactgcgtaagatccctggtcggc

SEQ ID NO: 23719 - DNA, 26 bp, Homo sapiens
tgactgcgtaagatccctggtcggca

SEQ ID NO: 23720 - DNA, 26 bp, Homo sapiens
gactgcgtaagatccctggtcggcag

SEQ ID NO: 23721 - DNA, 26 bp, Homo sapiens
actgcgtaagatccctggtcggcagg

SEQ ID NO: 23722 - DNA, 26 bp, Homo sapiens
ctgcgtaagatccctggtcggcaggg

SEQ ID NO: 23723 - DNA, 26 bp, Homo sapiens
tgcgtaagatccctggtcggcagggc

SEQ ID NO: 23724 - DNA, 26 bp, Homo sapiens
gcgtaagatccctggtcggcagggcc

SEQ ID NO: 23725 - DNA, 26 bp, Homo sapiens
cgtaagatccctggtcggcagggccc

SEQ ID NO: 23726 - DNA, 26 bp, Homo sapiens
gtaagatccctggtcggcagggccca

SEQ ID NO: 23727 - DNA, 26 bp, Homo sapiens
taagatccctggtcggcagggcccac

SEQ ID NO: 23728 - DNA, 26 bp, Homo sapiens
aagatccctggtcggcagggcccact

SEQ ID NO: 23729 - DNA, 26 bp, Homo sapiens
agatccctggtcggcagggcccactt

SEQ ID NO: 23730 - DNA, 26 bp, Homo sapiens
gatccctggtcggcagggcccacttc

SEQ ID NO: 23731 - DNA, 26 bp, Homo sapiens
atccctggtcggcagggcccacttcc

SEQ ID NO: 23732 - DNA, 26 bp, Homo sapiens
tccctggtcggcagggcccacttccc

SEQ ID NO: 23733 - DNA, 26 bp, Homo sapiens
ccctggtcggcagggcccacttcccg

SEQ ID NO: 23734 - DNA, 26 bp, Homo sapiens
cctggtcggcagggcccacttcccgc

SEQ ID NO: 23735 - DNA, 26 bp, Homo sapiens
ctggtcggcagggcccacttcccgca

SEQ ID NO: 23736 - DNA, 26 bp, Homo sapiens
tggtcggcagggcccacttcccgcac

SEQ ID NO: 23737 - DNA, 26 bp, Homo sapiens
ggtcggcagggcccacttcccgcact

SEQ ID NO: 23738 - DNA, 26 bp, Homo sapiens
gtcggcagggcccacttcccgcactg

SEQ ID NO: 23739 - DNA, 26 bp, Homo sapiens
tcggcagggcccacttcccgcactgt

SEQ ID NO: 23740 - DNA, 26 bp, Homo sapiens
cggcagggcccacttcccgcactgtc

SEQ ID NO: 23741 - DNA, 26 bp, Homo sapiens
ggcagggcccacttcccgcactgtca

SEQ ID NO: 23742 - DNA, 26 bp, Homo sapiens
gcagggcccacttcccgcactgtcag

SEQ ID NO: 23743 - DNA, 26 bp, Homo sapiens
cagggcccacttcccgcactgtcagc

SEQ ID NO: 23744 - DNA, 26 bp, Homo sapiens
agggcccacttcccgcactgtcagcg

SEQ ID NO: 23745 - DNA, 26 bp, Homo sapiens
gggcccacttcccgcactgtcagcgt

SEQ ID NO: 23746 - DNA, 26 bp, Homo sapiens
ggcccacttcccgcactgtcagcgta

SEQ ID NO: 23747 - DNA, 26 bp, Homo sapiens
gcccacttcccgcactgtcagcgtat

SEQ ID NO: 23748 - DNA, 26 bp, Homo sapiens
cccacttcccgcactgtcagcgtatg

SEQ ID NO: 23749 - DNA, 26 bp, Homo sapiens
ccacttcccgcactgtcagcgtatgc

SEQ ID NO: 23750 - DNA, 26 bp, Homo sapiens
cacttcccgcactgtcagcgtatgcc

SEQ ID NO: 23751 - DNA, 26 bp, Homo sapiens
acttcccgcactgtcagcgtatgccg

SEQ ID NO: 23752 - DNA, 26 bp, Homo sapiens
cttcccgcactgtcagcgtatgccgt

SEQ ID NO: 23753 - DNA, 26 bp, Homo sapiens
ttcccgcactgtcagcgtatgccgtg

SEQ ID NO: 23754 - DNA, 26 bp, Homo sapiens
tcccgcactgtcagcgtatgccgtgt

SEQ ID NO: 23755 - DNA, 26 bp, Homo sapiens
cccgcactgtcagcgtatgccgtgtg

SEQ ID NO: 23756 - DNA, 26 bp, Homo sapiens
ccgcactgtcagcgtatgccgtgtgc

SEQ ID NO: 23757 - DNA, 26 bp, Homo sapiens
cgcactgtcagcgtatgccgtgtgcc

SEQ ID NO: 23758 - DNA, 26 bp, Homo sapiens
gcactgtcagcgtatgccgtgtgccc

SEQ ID NO: 23759 - DNA, 26 bp, Homo sapiens
cactgtcagcgtatgccgtgtgccct

SEQ ID NO: 23760 - DNA, 26 bp, Homo sapiens
actgtcagcgtatgccgtgtgccctc

SEQ ID NO: 23761 - DNA, 26 bp, Homo sapiens
ctgtcagcgtatgccgtgtgccctct

SEQ ID NO: 23762 - DNA, 26 bp, Homo sapiens
tgtcagcgtatgccgtgtgccctctg

SEQ ID NO: 23763 - DNA, 26 bp, Homo sapiens
gtcagcgtatgccgtgtgccctctgt

SEQ ID NO: 23764 - DNA, 26 bp, Homo sapiens
tcagcgtatgccgtgtgccctctgtg

SEQ ID NO: 23765 - DNA, 26 bp, Homo sapiens
cagcgtatgccgtgtgccctctgtgg

SEQ ID NO: 23766 - DNA, 26 bp, Homo sapiens
agcgtatgccgtgtgccctctgtggc

SEQ ID NO: 23767 - DNA, 26 bp, Homo sapiens
gcgtatgccgtgtgccctctgtggcc

SEQ ID NO: 23768 - DNA, 26 bp, Homo sapiens
cgtatgccgtgtgccctctgtggcca

SEQ ID NO: 23769 - DNA, 26 bp, Homo sapiens
gtatgccgtgtgccctctgtggccag

SEQ ID NO: 23770 - DNA, 26 bp, Homo sapiens
tatgccgtgtgccctctgtggccagg

SEQ ID NO: 23771 - DNA, 26 bp, Homo sapiens
atgccgtgtgccctctgtggccaggc

SEQ ID NO: 23772 - DNA, 26 bp, Homo sapiens
tgccgtgtgccctctgtggccaggcc

SEQ ID NO: 23773 - DNA, 26 bp, Homo sapiens
gccgtgtgccctctgtggccaggccg

SEQ ID NO: 23774 - DNA, 26 bp, Homo sapiens
ccgtgtgccctctgtggccaggccgt

SEQ ID NO: 23775 - DNA, 26 bp, Homo sapiens
cgtgtgccctctgtggccaggccgta

SEQ ID NO: 23776 - DNA, 26 bp, Homo sapiens
gtgtgccctctgtggccaggccgtac

SEQ ID NO: 23777 - DNA, 26 bp, Homo sapiens
tgtgccctctgtggccaggccgtact

SEQ ID NO: 23778 - DNA, 26 bp, Homo sapiens
gtgccctctgtggccaggccgtactt

SEQ ID NO: 23779 - DNA, 26 bp, Homo sapiens
tgccctctgtggccaggccgtacttg

SEQ ID NO: 23780 - DNA, 26 bp, Homo sapiens
gccctctgtggccaggccgtacttgt

SEQ ID NO: 23781 - DNA, 26 bp, Homo sapiens
ccctctgtggccaggccgtacttgtt

SEQ ID NO: 23782 - DNA, 26 bp, Homo sapiens
cctctgtggccaggccgtacttgttg

SEQ ID NO: 23783 - DNA, 26 bp, Homo sapiens
ctctgtggccaggccgtacttgttgc

SEQ ID NO: 23784 - DNA, 26 bp, Homo sapiens
tctgtggccaggccgtacttgttgct

SEQ ID NO: 23785 - DNA, 26 bp, Homo sapiens
ctgtggccaggccgtacttgttgctg

SEQ ID NO: 23786 - DNA, 26 bp, Homo sapiens
tgtggccaggccgtacttgttgctgg

SEQ ID NO: 23787 - DNA, 26 bp, Homo sapiens
gtggccaggccgtacttgttgctggc

SEQ ID NO: 23788 - DNA, 26 bp, Homo sapiens
tggccaggccgtacttgttgctggcg

SEQ ID NO: 23789 - DNA, 26 bp, Homo sapiens
ggccaggccgtacttgttgctggcgc

SEQ ID NO: 23790 - DNA, 26 bp, Homo sapiens
gccaggccgtacttgttgctggcgct

SEQ ID NO: 23791 - DNA, 26 bp, Homo sapiens
ccaggccgtacttgttgctggcgctg

SEQ ID NO: 23792 - DNA, 26 bp, Homo sapiens
caggccgtacttgttgctggcgctga

SEQ ID NO: 23793 - DNA, 26 bp, Homo sapiens
aggccgtacttgttgctggcgctgat

SEQ ID NO: 23794 - DNA, 26 bp, Homo sapiens
ggccgtacttgttgctggcgctgatg

SEQ ID NO: 23795 - DNA, 26 bp, Homo sapiens
gccgtacttgttgctggcgctgatgt

SEQ ID NO: 23796 - DNA, 26 bp, Homo sapiens
ccgtacttgttgctggcgctgatgtc

SEQ ID NO: 23797 - DNA, 26 bp, Homo sapiens
cgtacttgttgctggcgctgatgtca

SEQ ID NO: 23798 - DNA, 26 bp, Homo sapiens
gtacttgttgctggcgctgatgtcac

SEQ ID NO: 23799 - DNA, 26 bp, Homo sapiens
tacttgttgctggcgctgatgtcact

SEQ ID NO: 23800 - DNA, 26 bp, Homo sapiens
acttgttgctggcgctgatgtcactg

SEQ ID NO: 23801 - DNA, 26 bp, Homo sapiens
cttgttgctggcgctgatgtcactgc

SEQ ID NO: 23802 - DNA, 26 bp, Homo sapiens
ttgttgctggcgctgatgtcactgcc

SEQ ID NO: 23803 - DNA, 26 bp, Homo sapiens
tgttgctggcgctgatgtcactgcct

SEQ ID NO: 23804 - DNA, 26 bp, Homo sapiens
gttgctggcgctgatgtcactgcctc

SEQ ID NO: 23805 - DNA, 26 bp, Homo sapiens
ttgctggcgctgatgtcactgcctcc

SEQ ID NO: 23806 - DNA, 26 bp, Homo sapiens
tgctggcgctgatgtcactgcctccg

SEQ ID NO: 23807 - DNA, 26 bp, Homo sapiens
gctggcgctgatgtcactgcctccgc

SEQ ID NO: 23808 - DNA, 26 bp, Homo sapiens
ctggcgctgatgtcactgcctccgcg

SEQ ID NO: 23809 - DNA, 26 bp, Homo sapiens
tggcgctgatgtcactgcctccgcgc

SEQ ID NO: 23810 - DNA, 26 bp, Homo sapiens
ggcgctgatgtcactgcctccgcgct

SEQ ID NO: 23811 - DNA, 26 bp, Homo sapiens
gcgctgatgtcactgcctccgcgctg

SEQ ID NO: 23812 - DNA, 26 bp, Homo sapiens
cgctgatgtcactgcctccgcgctgc

SEQ ID NO: 23813 - DNA, 26 bp, Homo sapiens
gctgatgtcactgcctccgcgctgcc

SEQ ID NO: 23814 - DNA, 26 bp, Homo sapiens
ctgatgtcactgcctccgcgctgcca

SEQ ID NO: 23815 - DNA, 26 bp, Homo sapiens
tgatgtcactgcctccgcgctgccag

SEQ ID NO: 23816 - DNA, 26 bp, Homo sapiens
gatgtcactgcctccgcgctgccagc

SEQ ID NO: 23817 - DNA, 26 bp, Homo sapiens
atgtcactgcctccgcgctgccagcg

SEQ ID NO: 23818 - DNA, 26 bp, Homo sapiens
tgtcactgcctccgcgctgccagcgc

SEQ ID NO: 23819 - DNA, 26 bp, Homo sapiens
gtcactgcctccgcgctgccagcgca

SEQ ID NO: 23820 - DNA, 26 bp, Homo sapiens
tcactgcctccgcgctgccagcgcac

SEQ ID NO: 23821 - DNA, 26 bp, Homo sapiens
cactgcctccgcgctgccagcgcacc

SEQ ID NO: 23822 - DNA, 26 bp, Homo sapiens
actgcctccgcgctgccagcgcacct

SEQ ID NO: 23823 - DNA, 26 bp, Homo sapiens
ctgcctccgcgctgccagcgcacctt

SEQ ID NO: 23824 - DNA, 26 bp, Homo sapiens
tgcctccgcgctgccagcgcaccttc

SEQ ID NO: 23825 - DNA, 26 bp, Homo sapiens
gcctccgcgctgccagcgcaccttca

SEQ ID NO: 23826 - DNA, 26 bp, Homo sapiens
cctccgcgctgccagcgcaccttcac

SEQ ID NO: 23827 - DNA, 26 bp, Homo sapiens
ctccgcgctgccagcgcaccttcact

SEQ ID NO: 23828 - DNA, 26 bp, Homo sapiens
tccgcgctgccagcgcaccttcactc

SEQ ID NO: 23829 - DNA, 26 bp, Homo sapiens
ccgcgctgccagcgcaccttcactcc

SEQ ID NO: 23830 - DNA, 26 bp, Homo sapiens
cgcgctgccagcgcaccttcactcct

SEQ ID NO: 23831 - DNA, 26 bp, Homo sapiens
gcgctgccagcgcaccttcactcctg

SEQ ID NO: 23832 - DNA, 26 bp, Homo sapiens
cgctgccagcgcaccttcactcctgc

SEQ ID NO: 23833 - DNA, 26 bp, Homo sapiens
gctgccagcgcaccttcactcctgcc

SEQ ID NO: 23834 - DNA, 26 bp, Homo sapiens
ctgccagcgcaccttcactcctgccc

SEQ ID NO: 23835 - DNA, 26 bp, Homo sapiens
tgccagcgcaccttcactcctgcccg

SEQ ID NO: 23836 - DNA, 26 bp, Homo sapiens
gccagcgcaccttcactcctgcccgc

SEQ ID NO: 23837 - DNA, 26 bp, Homo sapiens
ccagcgcaccttcactcctgcccgct

SEQ ID NO: 23838 - DNA, 26 bp, Homo sapiens
cagcgcaccttcactcctgcccgctc

SEQ ID NO: 23839 - DNA, 26 bp, Homo sapiens
agcgcaccttcactcctgcccgctct

SEQ ID NO: 23840 - DNA, 26 bp, Homo sapiens
gcgcaccttcactcctgcccgctctg

SEQ ID NO: 23841 - DNA, 26 bp, Homo sapiens
cgcaccttcactcctgcccgctctgt

SEQ ID NO: 23842 - DNA, 26 bp, Homo sapiens
gcaccttcactcctgcccgctctgtc

SEQ ID NO: 23843 - DNA, 26 bp, Homo sapiens
caccttcactcctgcccgctctgtct

SEQ ID NO: 23844 - DNA, 26 bp, Homo sapiens
accttcactcctgcccgctctgtctc

SEQ ID NO: 23845 - DNA, 26 bp, Homo sapiens
ccttcactcctgcccgctctgtctcg

SEQ ID NO: 23846 - DNA, 26 bp, Homo sapiens
cttcactcctgcccgctctgtctcgg

SEQ ID NO: 23847 - DNA, 26 bp, Homo sapiens
ttcactcctgcccgctctgtctcggc

SEQ ID NO: 23848 - DNA, 26 bp, Homo sapiens
tcactcctgcccgctctgtctcggcc

SEQ ID NO: 23849 - DNA, 26 bp, Homo sapiens
cactcctgcccgctctgtctcggcct

SEQ ID NO: 23850 - DNA, 26 bp, Homo sapiens
actcctgcccgctctgtctcggcctc

SEQ ID NO: 23851 - DNA, 26 bp, Homo sapiens
ctcctgcccgctctgtctcggcctcg

SEQ ID NO: 23852 - DNA, 26 bp, Homo sapiens
tcctgcccgctctgtctcggcctcga

SEQ ID NO: 23853 - DNA, 26 bp, Homo sapiens
cctgcccgctctgtctcggcctcgaa

SEQ ID NO: 23854 - DNA, 26 bp, Homo sapiens
ctgcccgctctgtctcggcctcgaac

SEQ ID NO: 23855 - DNA, 26 bp, Homo sapiens
tgcccgctctgtctcggcctcgaaca

SEQ ID NO: 23856 - DNA, 26 bp, Homo sapiens
gcccgctctgtctcggcctcgaacac

SEQ ID NO: 23857 - DNA, 26 bp, Homo sapiens
cccgctctgtctcggcctcgaacacg

SEQ ID NO: 23858 - DNA, 26 bp, Homo sapiens
ccgctctgtctcggcctcgaacacgg

SEQ ID NO: 23859 - DNA, 26 bp, Homo sapiens
cgctctgtctcggcctcgaacacggc

SEQ ID NO: 23860 - DNA, 26 bp, Homo sapiens
gctctgtctcggcctcgaacacggca

SEQ ID NO: 23861 - DNA, 26 bp, Homo sapiens
ctctgtctcggcctcgaacacggcag

SEQ ID NO: 23862 - DNA, 26 bp, Homo sapiens
tctgtctcggcctcgaacacggcagg

SEQ ID NO: 23863 - DNA, 26 bp, Homo sapiens
ctgtctcggcctcgaacacggcaggg

SEQ ID NO: 23864 - DNA, 26 bp, Homo sapiens
tgtctcggcctcgaacacggcagggc

SEQ ID NO: 23865 - DNA, 26 bp, Homo sapiens
gtctcggcctcgaacacggcagggct

SEQ ID NO: 23866 - DNA, 26 bp, Homo sapiens
tctcggcctcgaacacggcagggctg

SEQ ID NO: 23867 - DNA, 26 bp, Homo sapiens
ctcggcctcgaacacggcagggctgc

SEQ ID NO: 23868 - DNA, 26 bp, Homo sapiens
tcggcctcgaacacggcagggctgcc

SEQ ID NO: 23869 - DNA, 26 bp, Homo sapiens
cggcctcgaacacggcagggctgcct

SEQ ID NO: 23870 - DNA, 26 bp, Homo sapiens
ggcctcgaacacggcagggctgcctg

SEQ ID NO: 23871 - DNA, 26 bp, Homo sapiens
gcctcgaacacggcagggctgcctgc

SEQ ID NO: 23872 - DNA, 26 bp, Homo sapiens
cctcgaacacggcagggctgcctgcg

SEQ ID NO: 23873 - DNA, 26 bp, Homo sapiens
ctcgaacacggcagggctgcctgcgg

SEQ ID NO: 23874 - DNA, 26 bp, Homo sapiens
tcgaacacggcagggctgcctgcggc

SEQ ID NO: 23875 - DNA, 26 bp, Homo sapiens
cgaacacggcagggctgcctgcggcc

SEQ ID NO: 23876 - DNA, 26 bp, Homo sapiens
gaacacggcagggctgcctgcggcca

SEQ ID NO: 23877 - DNA, 26 bp, Homo sapiens
aacacggcagggctgcctgcggccac

SEQ ID NO: 23878 - DNA, 26 bp, Homo sapiens
acacggcagggctgcctgcggccact

SEQ ID NO: 23879 - DNA, 26 bp, Homo sapiens
cacggcagggctgcctgcggccactt

SEQ ID NO: 23880 - DNA, 26 bp, Homo sapiens
acggcagggctgcctgcggccacttc

SEQ ID NO: 23881 - DNA, 26 bp, Homo sapiens
cggcagggctgcctgcggccacttcc

SEQ ID NO: 23882 - DNA, 26 bp, Homo sapiens
ggcagggctgcctgcggccacttcca

SEQ ID NO: 23883 - DNA, 26 bp, Homo sapiens
gcagggctgcctgcggccacttccac

SEQ ID NO: 23884 - DNA, 26 bp, Homo sapiens
cagggctgcctgcggccacttccact

SEQ ID NO: 23885 - DNA, 26 bp, Homo sapiens
agggctgcctgcggccacttccactg

SEQ ID NO: 23886 - DNA, 26 bp, Homo sapiens
gggctgcctgcggccacttccactga

SEQ ID NO: 23887 - DNA, 26 bp, Homo sapiens
ggctgcctgcggccacttccactgac

SEQ ID NO: 23888 - DNA, 26 bp, Homo sapiens
gctgcctgcggccacttccactgacc

SEQ ID NO: 23889 - DNA, 26 bp, Homo sapiens
ctgcctgcggccacttccactgaccg

SEQ ID NO: 23890 - DNA, 26 bp, Homo sapiens
tgcctgcggccacttccactgaccgt

SEQ ID NO: 23891 - DNA, 26 bp, Homo sapiens
gcctgcggccacttccactgaccgtg

SEQ ID NO: 23892 - DNA, 26 bp, Homo sapiens
cctgcggccacttccactgaccgtgg

SEQ ID NO: 23893 - DNA, 26 bp, Homo sapiens
ctgcggccacttccactgaccgtggc

SEQ ID NO: 23894 - DNA, 26 bp, Homo sapiens
tgcggccacttccactgaccgtggct

SEQ ID NO: 23895 - DNA, 26 bp, Homo sapiens
gcggccacttccactgaccgtggctt

SEQ ID NO: 23896 - DNA, 26 bp, Homo sapiens
cggccacttccactgaccgtggcttc

SEQ ID NO: 23897 - DNA, 26 bp, Homo sapiens
ggccacttccactgaccgtggcttct

SEQ ID NO: 23898 - DNA, 26 bp, Homo sapiens
gccacttccactgaccgtggcttctt

SEQ ID NO: 23899 - DNA, 26 bp, Homo sapiens
ccacttccactgaccgtggcttcttg

SEQ ID NO: 23900 - DNA, 26 bp, Homo sapiens
cacttccactgaccgtggcttcttgc

SEQ ID NO: 23901 - DNA, 26 bp, Homo sapiens
acttccactgaccgtggcttcttgct

SEQ ID NO: 23902 - DNA, 26 bp, Homo sapiens
cttccactgaccgtggcttcttgcta

SEQ ID NO: 23903 - DNA, 26 bp, Homo sapiens
ttccactgaccgtggcttcttgctaa

SEQ ID NO: 23904 - DNA, 26 bp, Homo sapiens
tccactgaccgtggcttcttgctaaa

SEQ ID NO: 23905 - DNA, 26 bp, Homo sapiens
ccactgaccgtggcttcttgctaaaa

SEQ ID NO: 23906 - DNA, 26 bp, Homo sapiens
cactgaccgtggcttcttgctaaaag

SEQ ID NO: 23907 - DNA, 26 bp, Homo sapiens
actgaccgtggcttcttgctaaaagc

SEQ ID NO: 23908 - DNA, 26 bp, Homo sapiens
ctgaccgtggcttcttgctaaaagct

SEQ ID NO: 23909 - DNA, 26 bp, Homo sapiens
tgaccgtggcttcttgctaaaagctg

SEQ ID NO: 23910 - DNA, 26 bp, Homo sapiens
gaccgtggcttcttgctaaaagctga

SEQ ID NO: 23911 - DNA, 26 bp, Homo sapiens
accgtggcttcttgctaaaagctgag

SEQ ID NO: 23912 - DNA, 26 bp, Homo sapiens
ccgtggcttcttgctaaaagctgaga

SEQ ID NO: 23913 - DNA, 26 bp, Homo sapiens
cgtggcttcttgctaaaagctgagac

SEQ ID NO: 23914 - DNA, 26 bp, Homo sapiens
gtggcttcttgctaaaagctgagact

SEQ ID NO: 23915 - DNA, 26 bp, Homo sapiens
tggcttcttgctaaaagctgagactg

SEQ ID NO: 23916 - DNA, 26 bp, Homo sapiens
ggcttcttgctaaaagctgagactgg

SEQ ID NO: 23917 - DNA, 26 bp, Homo sapiens
gcttcttgctaaaagctgagactggc

SEQ ID NO: 23918 - DNA, 26 bp, Homo sapiens
cttcttgctaaaagctgagactggct

SEQ ID NO: 23919 - DNA, 26 bp, Homo sapiens
ttcttgctaaaagctgagactggctt

SEQ ID NO: 23920 - DNA, 26 bp, Homo sapiens
tcttgctaaaagctgagactggcttc

SEQ ID NO: 23921 - DNA, 26 bp, Homo sapiens
cttgctaaaagctgagactggcttct

SEQ ID NO: 23922 - DNA, 26 bp, Homo sapiens
ttgctaaaagctgagactggcttctt

SEQ ID NO: 23923 - DNA, 26 bp, Homo sapiens
tgctaaaagctgagactggcttcttc

SEQ ID NO: 23924 - DNA, 26 bp, Homo sapiens
gctaaaagctgagactggcttcttcc

SEQ ID NO: 23925 - DNA, 26 bp, Homo sapiens
ctaaaagctgagactggcttcttccc

SEQ ID NO: 23926 - DNA, 26 bp, Homo sapiens
taaaagctgagactggcttcttcccc

SEQ ID NO: 23927 - DNA, 26 bp, Homo sapiens
aaaagctgagactggcttcttccccg

SEQ ID NO: 23928 - DNA, 26 bp, Homo sapiens
aaagctgagactggcttcttccccgg

SEQ ID NO: 23929 - DNA, 26 bp, Homo sapiens
aagctgagactggcttcttccccggc

SEQ ID NO: 23930 - DNA, 26 bp, Homo sapiens
agctgagactggcttcttccccggct

SEQ ID NO: 23931 - DNA, 26 bp, Homo sapiens
gctgagactggcttcttccccggctc

SEQ ID NO: 23932 - DNA, 26 bp, Homo sapiens
ctgagactggcttcttccccggctca

SEQ ID NO: 23933 - DNA, 26 bp, Homo sapiens
tgagactggcttcttccccggctcag

SEQ ID NO: 23934 - DNA, 26 bp, Homo sapiens
gagactggcttcttccccggctcagg

SEQ ID NO: 23935 - DNA, 26 bp, Homo sapiens
agactggcttcttccccggctcaggc

SEQ ID NO: 23936 - DNA, 26 bp, Homo sapiens
gactggcttcttccccggctcaggca

SEQ ID NO: 23937 - DNA, 26 bp, Homo sapiens
actggcttcttccccggctcaggcat

SEQ ID NO: 23938 - DNA, 26 bp, Homo sapiens
ctggcttcttccccggctcaggcatc

SEQ ID NO: 23939 - DNA, 26 bp, Homo sapiens
tggcttcttccccggctcaggcatcc

SEQ ID NO: 23940 - DNA, 26 bp, Homo sapiens
ggcttcttccccggctcaggcatcct

SEQ ID NO: 23941 - DNA, 26 bp, Homo sapiens
gcttcttccccggctcaggcatcctg

SEQ ID NO: 23942 - DNA, 26 bp, Homo sapiens
cttcttccccggctcaggcatcctga

SEQ ID NO: 23943 - DNA, 26 bp, Homo sapiens
ttcttccccggctcaggcatcctgag

SEQ ID NO: 23944 - DNA, 26 bp, Homo sapiens
tcttccccggctcaggcatcctgaga

SEQ ID NO: 23945 - DNA, 26 bp, Homo sapiens
cttccccggctcaggcatcctgagag

SEQ ID NO: 23946 - DNA, 26 bp, Homo sapiens
ttccccggctcaggcatcctgagaga

SEQ ID NO: 23947 - DNA, 26 bp, Homo sapiens
tccccggctcaggcatcctgagagac

SEQ ID NO: 23948 - DNA, 26 bp, Homo sapiens
ccccggctcaggcatcctgagagacg

SEQ ID NO: 23949 - DNA, 26 bp, Homo sapiens
cccggctcaggcatcctgagagacgt

SEQ ID NO: 23950 - DNA, 26 bp, Homo sapiens
ccggctcaggcatcctgagagacgtc

SEQ ID NO: 23951 - DNA, 26 bp, Homo sapiens
cggctcaggcatcctgagagacgtca

SEQ ID NO: 23952 - DNA, 26 bp, Homo sapiens
ggctcaggcatcctgagagacgtcac

SEQ ID NO: 23953 - DNA, 26 bp, Homo sapiens
gctcaggcatcctgagagacgtcaca

SEQ ID NO: 23954 - DNA, 26 bp, Homo sapiens
ctcaggcatcctgagagacgtcacac

SEQ ID NO: 23955 - DNA, 26 bp, Homo sapiens
tcaggcatcctgagagacgtcacacc

SEQ ID NO: 23956 - DNA, 26 bp, Homo sapiens
caggcatcctgagagacgtcacacca

SEQ ID NO: 23957 - DNA, 26 bp, Homo sapiens
aggcatcctgagagacgtcacaccag

SEQ ID NO: 23958 - DNA, 26 bp, Homo sapiens
ggcatcctgagagacgtcacaccagg

SEQ ID NO: 23959 - DNA, 26 bp, Homo sapiens
gcatcctgagagacgtcacaccaggc

SEQ ID NO: 23960 - DNA, 26 bp, Homo sapiens
catcctgagagacgtcacaccaggca

SEQ ID NO: 23961 - DNA, 26 bp, Homo sapiens
atcctgagagacgtcacaccaggcac

SEQ ID NO: 23962 - DNA, 26 bp, Homo sapiens
tcctgagagacgtcacaccaggcacg

SEQ ID NO: 23963 - DNA, 26 bp, Homo sapiens
cctgagagacgtcacaccaggcacga

SEQ ID NO: 23964 - DNA, 26 bp, Homo sapiens
ctgagagacgtcacaccaggcacgaa

SEQ ID NO: 23965 - DNA, 26 bp, Homo sapiens
tgagagacgtcacaccaggcacgaag

SEQ ID NO: 23966 - DNA, 26 bp, Homo sapiens
gagagacgtcacaccaggcacgaagc

SEQ ID NO: 23967 - DNA, 26 bp, Homo sapiens
agagacgtcacaccaggcacgaagca

SEQ ID NO: 23968 - DNA, 26 bp, Homo sapiens
gagacgtcacaccaggcacgaagcag

SEQ ID NO: 23969 - DNA, 26 bp, Homo sapiens
agacgtcacaccaggcacgaagcagg

SEQ ID NO: 23970 - DNA, 26 bp, Homo sapiens
gacgtcacaccaggcacgaagcaggc

SEQ ID NO: 23971 - DNA, 26 bp, Homo sapiens
acgtcacaccaggcacgaagcaggca

SEQ ID NO: 23972 - DNA, 26 bp, Homo sapiens
cgtcacaccaggcacgaagcaggcac

SEQ ID NO: 23973 - DNA, 26 bp, Homo sapiens
gtcacaccaggcacgaagcaggcaca

SEQ ID NO: 23974 - DNA, 26 bp, Homo sapiens
tcacaccaggcacgaagcaggcacag

SEQ ID NO: 23975 - DNA, 26 bp, Homo sapiens
cacaccaggcacgaagcaggcacagg

SEQ ID NO: 23976 - DNA, 26 bp, Homo sapiens
acaccaggcacgaagcaggcacaggt

SEQ ID NO: 23977 - DNA, 26 bp, Homo sapiens
caccaggcacgaagcaggcacaggtc

SEQ ID NO: 23978 - DNA, 26 bp, Homo sapiens
accaggcacgaagcaggcacaggtca

SEQ ID NO: 23979 - DNA, 26 bp, Homo sapiens
ccaggcacgaagcaggcacaggtcac

SEQ ID NO: 23980 - DNA, 26 bp, Homo sapiens
caggcacgaagcaggcacaggtcacc

SEQ ID NO: 23981 - DNA, 26 bp, Homo sapiens
aggcacgaagcaggcacaggtcaccc

SEQ ID NO: 23982 - DNA, 26 bp, Homo sapiens
ggcacgaagcaggcacaggtcaccca

SEQ ID NO: 23983 - DNA, 26 bp, Homo sapiens
gcacgaagcaggcacaggtcacccaa

SEQ ID NO: 23984 - DNA, 26 bp, Homo sapiens
cacgaagcaggcacaggtcacccaaa

SEQ ID NO: 23985 - DNA, 26 bp, Homo sapiens
acgaagcaggcacaggtcacccaaag

SEQ ID NO: 23986 - DNA, 26 bp, Homo sapiens
cgaagcaggcacaggtcacccaaaga

SEQ ID NO: 23987 - DNA, 26 bp, Homo sapiens
gaagcaggcacaggtcacccaaagag

SEQ ID NO: 23988 - DNA, 26 bp, Homo sapiens
aagcaggcacaggtcacccaaagagg

SEQ ID NO: 23989 - DNA, 26 bp, Homo sapiens
agcaggcacaggtcacccaaagaggg

SEQ ID NO: 23990 - DNA, 26 bp, Homo sapiens
gcaggcacaggtcacccaaagaggga

SEQ ID NO: 23991 - DNA, 26 bp, Homo sapiens
caggcacaggtcacccaaagagggac

SEQ ID NO: 23992 - DNA, 26 bp, Homo sapiens
aggcacaggtcacccaaagagggact

SEQ ID NO: 23993 - DNA, 26 bp, Homo sapiens
tcagtgtgtggtggctttttattact

SEQ ID NO: 23994 - DNA, 26 bp, Homo sapiens
cagtgtgtggtggctttttattactg

SEQ ID NO: 23995 - DNA, 26 bp, Homo sapiens
agtgtgtggtggctttttattactgg

SEQ ID NO: 23996 - DNA, 26 bp, Homo sapiens
gtgtgtggtggctttttattactggt

SEQ ID NO: 23997 - DNA, 26 bp, Homo sapiens
tgtgtggtggctttttattactggtg

SEQ ID NO: 23998 - DNA, 26 bp, Homo sapiens
gtgtggtggctttttattactggtgt

SEQ ID NO: 23999 - DNA, 26 bp, Homo sapiens
tgtggtggctttttattactggtgtg

SEQ ID NO: 24000 - DNA, 26 bp, Homo sapiens
gtggtggctttttattactggtgtgg

SEQ ID NO: 24001 - DNA, 26 bp, Homo sapiens
tggtggctttttattactggtgtgga

SEQ ID NO: 24002 - DNA, 26 bp, Homo sapiens
ggtggctttttattactggtgtggag

SEQ ID NO: 24003 - DNA, 26 bp, Homo sapiens
gtggctttttattactggtgtggagt

SEQ ID NO: 24004 - DNA, 26 bp, Homo sapiens
tggctttttattactggtgtggagtg

SEQ ID NO: 24005 - DNA, 26 bp, Homo sapiens
ggctttttattactggtgtggagtgg

SEQ ID NO: 24006 - DNA, 26 bp, Homo sapiens
gctttttattactggtgtggagtggg

SEQ ID NO: 24007 - DNA, 26 bp, Homo sapiens
ctttttattactggtgtggagtgggt

SEQ ID NO: 24008 - DNA, 26 bp, Homo sapiens
tttttattactggtgtggagtgggtg

SEQ ID NO: 24009 - DNA, 26 bp, Homo sapiens
ttttattactggtgtggagtgggtgt

SEQ ID NO: 24010 - DNA, 26 bp, Homo sapiens
tttattactggtgtggagtgggtgtg

SEQ ID NO: 24011 - DNA, 26 bp, Homo sapiens
ttattactggtgtggagtgggtgtgg

SEQ ID NO: 24012 - DNA, 26 bp, Homo sapiens
tattactggtgtggagtgggtgtggg

SEQ ID NO: 24013 - DNA, 26 bp, Homo sapiens
attactggtgtggagtgggtgtgggg

SEQ ID NO: 24014 - DNA, 26 bp, Homo sapiens
ttactggtgtggagtgggtgtggggg

SEQ ID NO: 24015 - DNA, 26 bp, Homo sapiens
tactggtgtggagtgggtgtgggggc

SEQ ID NO: 24016 - DNA, 26 bp, Homo sapiens
actggtgtggagtgggtgtgggggca

SEQ ID NO: 24017 - DNA, 26 bp, Homo sapiens
ctggtgtggagtgggtgtgggggcag

SEQ ID NO: 24018 - DNA, 26 bp, Homo sapiens
tggtgtggagtgggtgtgggggcagg

SEQ ID NO: 24019 - DNA, 26 bp, Homo sapiens
ggtgtggagtgggtgtgggggcaggc

SEQ ID NO: 24020 - DNA, 26 bp, Homo sapiens
gtgtggagtgggtgtgggggcaggca

SEQ ID NO: 24021 - DNA, 26 bp, Homo sapiens
tgtggagtgggtgtgggggcaggcag

SEQ ID NO: 24022 - DNA, 26 bp, Homo sapiens
gtggagtgggtgtgggggcaggcagg

SEQ ID NO: 24023 - DNA, 26 bp, Homo sapiens
tggagtgggtgtgggggcaggcagga

SEQ ID NO: 24024 - DNA, 26 bp, Homo sapiens
ggagtgggtgtgggggcaggcaggag

SEQ ID NO: 24025 - DNA, 26 bp, Homo sapiens
gagtgggtgtgggggcaggcaggagt

SEQ ID NO: 24026 - DNA, 26 bp, Homo sapiens
agtgggtgtgggggcaggcaggagtg

SEQ ID NO: 24027 - DNA, 26 bp, Homo sapiens
gtgggtgtgggggcaggcaggagtgg

SEQ ID NO: 24028 - DNA, 26 bp, Homo sapiens
tgggtgtgggggcaggcaggagtggt

SEQ ID NO: 24029 - DNA, 26 bp, Homo sapiens
gggtgtgggggcaggcaggagtggtg

SEQ ID NO: 24030 - DNA, 26 bp, Homo sapiens
ggtgtgggggcaggcaggagtggtgg

SEQ ID NO: 24031 - DNA, 26 bp, Homo sapiens
gtgtgggggcaggcaggagtggtggc

SEQ ID NO: 24032 - DNA, 26 bp, Homo sapiens
tgtgggggcaggcaggagtggtggct

SEQ ID NO: 24033 - DNA, 26 bp, Homo sapiens
gtgggggcaggcaggagtggtggctc

SEQ ID NO: 24034 - DNA, 26 bp, Homo sapiens
tgggggcaggcaggagtggtggctcc

SEQ ID NO: 24035 - DNA, 26 bp, Homo sapiens
gggggcaggcaggagtggtggctccc

SEQ ID NO: 24036 - DNA, 26 bp, Homo sapiens
ggggcaggcaggagtggtggctccca

SEQ ID NO: 24037 - DNA, 26 bp, Homo sapiens
gggcaggcaggagtggtggctcccac

SEQ ID NO: 24038 - DNA, 26 bp, Homo sapiens
ggcaggcaggagtggtggctcccacc

SEQ ID NO: 24039 - DNA, 26 bp, Homo sapiens
gcaggcaggagtggtggctcccacct

SEQ ID NO: 24040 - DNA, 26 bp, Homo sapiens
caggcaggagtggtggctcccaccta

SEQ ID NO: 24041 - DNA, 26 bp, Homo sapiens
aggcaggagtggtggctcccacctag

SEQ ID NO: 24042 - DNA, 26 bp, Homo sapiens
ggcaggagtggtggctcccacctagg

SEQ ID NO: 24043 - DNA, 26 bp, Homo sapiens
gcaggagtggtggctcccacctaggc

SEQ ID NO: 24044 - DNA, 26 bp, Homo sapiens
caggagtggtggctcccacctaggcc

SEQ ID NO: 24045 - DNA, 26 bp, Homo sapiens
aggagtggtggctcccacctaggcca

SEQ ID NO: 24046 - DNA, 26 bp, Homo sapiens
ggagtggtggctcccacctaggccag

SEQ ID NO: 24047 - DNA, 26 bp, Homo sapiens
gagtggtggctcccacctaggccagc

SEQ ID NO: 24048 - DNA, 26 bp, Homo sapiens
agtggtggctcccacctaggccagct

SEQ ID NO: 24049 - DNA, 26 bp, Homo sapiens
gtggtggctcccacctaggccagctc

SEQ ID NO: 24050 - DNA, 26 bp, Homo sapiens
tggtggctcccacctaggccagctcc

SEQ ID NO: 24051 - DNA, 26 bp, Homo sapiens
ggtggctcccacctaggccagctccc

SEQ ID NO: 24052 - DNA, 26 bp, Homo sapiens
gtggctcccacctaggccagctcccc

SEQ ID NO: 24053 - DNA, 26 bp, Homo sapiens
tggctcccacctaggccagctcccca

SEQ ID NO: 24054 - DNA, 26 bp, Homo sapiens
ggctcccacctaggccagctccccat

SEQ ID NO: 24055 - DNA, 26 bp, Homo sapiens
gctcccacctaggccagctccccatt

SEQ ID NO: 24056 - DNA, 26 bp, Homo sapiens
ctcccacctaggccagctccccattt

SEQ ID NO: 24057 - DNA, 26 bp, Homo sapiens
tcccacctaggccagctccccatttc

SEQ ID NO: 24058 - DNA, 26 bp, Homo sapiens
cccacctaggccagctccccatttcc

SEQ ID NO: 24059 - DNA, 26 bp, Homo sapiens
ccacctaggccagctccccatttcca

SEQ ID NO: 24060 - DNA, 26 bp, Homo sapiens
cacctaggccagctccccatttccaa

SEQ ID NO: 24061 - DNA, 26 bp, Homo sapiens
acctaggccagctccccatttccaaa

SEQ ID NO: 24062 - DNA, 26 bp, Homo sapiens
cctaggccagctccccatttccaaac

SEQ ID NO: 24063 - DNA, 26 bp, Homo sapiens
ctaggccagctccccatttccaaaca

SEQ ID NO: 24064 - DNA, 26 bp, Homo sapiens
taggccagctccccatttccaaacag

SEQ ID NO: 24065 - DNA, 26 bp, Homo sapiens
aggccagctccccatttccaaacagg

SEQ ID NO: 24066 - DNA, 26 bp, Homo sapiens
ggccagctccccatttccaaacagga

SEQ ID NO: 24067 - DNA, 26 bp, Homo sapiens
gccagctccccatttccaaacaggag

SEQ ID NO: 24068 - DNA, 26 bp, Homo sapiens
ccagctccccatttccaaacaggagc

SEQ ID NO: 24069 - DNA, 26 bp, Homo sapiens
cagctccccatttccaaacaggagct

SEQ ID NO: 24070 - DNA, 26 bp, Homo sapiens
agctccccatttccaaacaggagctg

SEQ ID NO: 24071 - DNA, 26 bp, Homo sapiens
gctccccatttccaaacaggagctgc

SEQ ID NO: 24072 - DNA, 26 bp, Homo sapiens
ctccccatttccaaacaggagctgcc

SEQ ID NO: 24073 - DNA, 26 bp, Homo sapiens
tccccatttccaaacaggagctgcct

SEQ ID NO: 24074 - DNA, 26 bp, Homo sapiens
ccccatttccaaacaggagctgcctg

SEQ ID NO: 24075 - DNA, 26 bp, Homo sapiens
cccatttccaaacaggagctgcctgg

SEQ ID NO: 24076 - DNA, 26 bp, Homo sapiens
ccatttccaaacaggagctgcctggg

SEQ ID NO: 24077 - DNA, 26 bp, Homo sapiens
catttccaaacaggagctgcctgggg

SEQ ID NO: 24078 - DNA, 26 bp, Homo sapiens
atttccaaacaggagctgcctggggt

SEQ ID NO: 24079 - DNA, 26 bp, Homo sapiens
tttccaaacaggagctgcctggggtg

SEQ ID NO: 24080 - DNA, 26 bp, Homo sapiens
ttccaaacaggagctgcctggggtgc

SEQ ID NO: 24081 - DNA, 26 bp, Homo sapiens
tccaaacaggagctgcctggggtgcc

SEQ ID NO: 24082 - DNA, 26 bp, Homo sapiens
ccaaacaggagctgcctggggtgccc

SEQ ID NO: 24083 - DNA, 26 bp, Homo sapiens
caaacaggagctgcctggggtgccca

SEQ ID NO: 24084 - DNA, 26 bp, Homo sapiens
aaacaggagctgcctggggtgcccag

SEQ ID NO: 24085 - DNA, 26 bp, Homo sapiens
aacaggagctgcctggggtgcccagg

SEQ ID NO: 24086 - DNA, 26 bp, Homo sapiens
acaggagctgcctggggtgcccagga

SEQ ID NO: 24087 - DNA, 26 bp, Homo sapiens
caggagctgcctggggtgcccaggag

SEQ ID NO: 24088 - DNA, 26 bp, Homo sapiens
aggagctgcctggggtgcccaggagg

SEQ ID NO: 24089 - DNA, 26 bp, Homo sapiens
ggagctgcctggggtgcccaggaggg

SEQ ID NO: 24090 - DNA, 26 bp, Homo sapiens
gagctgcctggggtgcccaggagggc

SEQ ID NO: 24091 - DNA, 26 bp, Homo sapiens
agctgcctggggtgcccaggagggcc

SEQ ID NO: 24092 - DNA, 26 bp, Homo sapiens
gctgcctggggtgcccaggagggccc

SEQ ID NO: 24093 - DNA, 26 bp, Homo sapiens
ctgcctggggtgcccaggagggcccg

SEQ ID NO: 24094 - DNA, 26 bp, Homo sapiens
tgcctggggtgcccaggagggcccgg

SEQ ID NO: 24095 - DNA, 26 bp, Homo sapiens
gcctggggtgcccaggagggcccggg

SEQ ID NO: 24096 - DNA, 26 bp, Homo sapiens
cctggggtgcccaggagggcccggga

SEQ ID NO: 24097 - DNA, 26 bp, Homo sapiens
ctggggtgcccaggagggcccgggaa

SEQ ID NO: 24098 - DNA, 26 bp, Homo sapiens
tggggtgcccaggagggcccgggaac

SEQ ID NO: 24099 - DNA, 26 bp, Homo sapiens
ggggtgcccaggagggcccgggaact

SEQ ID NO: 24100 - DNA, 26 bp, Homo sapiens
gggtgcccaggagggcccgggaactg

SEQ ID NO: 24101 - DNA, 26 bp, Homo sapiens
ggtgcccaggagggcccgggaactgg

SEQ ID NO: 24102 - DNA, 26 bp, Homo sapiens
gtgcccaggagggcccgggaactggg

SEQ ID NO: 24103 - DNA, 26 bp, Homo sapiens
tgcccaggagggcccgggaactgggg

SEQ ID NO: 24104 - DNA, 26 bp, Homo sapiens
gcccaggagggcccgggaactggggg

SEQ ID NO: 24105 - DNA, 26 bp, Homo sapiens
cccaggagggcccgggaactggggga

SEQ ID NO: 24106 - DNA, 26 bp, Homo sapiens
ccaggagggcccgggaactgggggag

SEQ ID NO: 24107 - DNA, 26 bp, Homo sapiens
caggagggcccgggaactgggggagt

SEQ ID NO: 24108 - DNA, 26 bp, Homo sapiens
aggagggcccgggaactgggggagtg

SEQ ID NO: 24109 - DNA, 26 bp, Homo sapiens
ggagggcccgggaactgggggagtgc

SEQ ID NO: 24110 - DNA, 26 bp, Homo sapiens
gagggcccgggaactgggggagtgca

SEQ ID NO: 24111 - DNA, 26 bp, Homo sapiens
agggcccgggaactgggggagtgcag

SEQ ID NO: 24112 - DNA, 26 bp, Homo sapiens
gggcccgggaactgggggagtgcagg

SEQ ID NO: 24113 - DNA, 26 bp, Homo sapiens
ggcccgggaactgggggagtgcaggc

SEQ ID NO: 24114 - DNA, 26 bp, Homo sapiens
gcccgggaactgggggagtgcaggcc

SEQ ID NO: 24115 - DNA, 26 bp, Homo sapiens
cccgggaactgggggagtgcaggccg

SEQ ID NO: 24116 - DNA, 26 bp, Homo sapiens
ccgggaactgggggagtgcaggccgg

SEQ ID NO: 24117 - DNA, 26 bp, Homo sapiens
cgggaactgggggagtgcaggccgga

SEQ ID NO: 24118 - DNA, 26 bp, Homo sapiens
gggaactgggggagtgcaggccggag

SEQ ID NO: 24119 - DNA, 26 bp, Homo sapiens
ggaactgggggagtgcaggccggagg

SEQ ID NO: 24120 - DNA, 26 bp, Homo sapiens
gaactgggggagtgcaggccggaggc

SEQ ID NO: 24121 - DNA, 26 bp, Homo sapiens
aactgggggagtgcaggccggaggca

SEQ ID NO: 24122 - DNA, 26 bp, Homo sapiens
actgggggagtgcaggccggaggcag

SEQ ID NO: 24123 - DNA, 26 bp, Homo sapiens
ctgggggagtgcaggccggaggcagg

SEQ ID NO: 24124 - DNA, 26 bp, Homo sapiens
tgggggagtgcaggccggaggcaggt

SEQ ID NO: 24125 - DNA, 26 bp, Homo sapiens
gggggagtgcaggccggaggcaggtg

SEQ ID NO: 24126 - DNA, 26 bp, Homo sapiens
ggggagtgcaggccggaggcaggtgc

SEQ ID NO: 24127 - DNA, 26 bp, Homo sapiens
gggagtgcaggccggaggcaggtgcg

SEQ ID NO: 24128 - DNA, 26 bp, Homo sapiens
ggagtgcaggccggaggcaggtgcga

SEQ ID NO: 24129 - DNA, 26 bp, Homo sapiens
gagtgcaggccggaggcaggtgcgag

SEQ ID NO: 24130 - DNA, 26 bp, Homo sapiens
agtgcaggccggaggcaggtgcgagc

SEQ ID NO: 24131 - DNA, 26 bp, Homo sapiens
gtgcaggccggaggcaggtgcgagcg

SEQ ID NO: 24132 - DNA, 26 bp, Homo sapiens
tgcaggccggaggcaggtgcgagcga

SEQ ID NO: 24133 - DNA, 26 bp, Homo sapiens
gcaggccggaggcaggtgcgagcgag

SEQ ID NO: 24134 - DNA, 26 bp, Homo sapiens
caggccggaggcaggtgcgagcgagg

SEQ ID NO: 24135 - DNA, 26 bp, Homo sapiens
aggccggaggcaggtgcgagcgagga

SEQ ID NO: 24136 - DNA, 26 bp, Homo sapiens
ggccggaggcaggtgcgagcgaggag

SEQ ID NO: 24137 - DNA, 26 bp, Homo sapiens
gccggaggcaggtgcgagcgaggagc

SEQ ID NO: 24138 - DNA, 26 bp, Homo sapiens
ccggaggcaggtgcgagcgaggagca

SEQ ID NO: 24139 - DNA, 26 bp, Homo sapiens
cggaggcaggtgcgagcgaggagcag

SEQ ID NO: 24140 - DNA, 26 bp, Homo sapiens
ggaggcaggtgcgagcgaggagcaga

SEQ ID NO: 24141 - DNA, 26 bp, Homo sapiens
gaggcaggtgcgagcgaggagcagat

SEQ ID NO: 24142 - DNA, 26 bp, Homo sapiens
aggcaggtgcgagcgaggagcagatc

SEQ ID NO: 24143 - DNA, 26 bp, Homo sapiens
ggcaggtgcgagcgaggagcagatct

SEQ ID NO: 24144 - DNA, 26 bp, Homo sapiens
gcaggtgcgagcgaggagcagatctt

SEQ ID NO: 24145 - DNA, 26 bp, Homo sapiens
caggtgcgagcgaggagcagatcttt

SEQ ID NO: 24146 - DNA, 26 bp, Homo sapiens
aggtgcgagcgaggagcagatctttg

SEQ ID NO: 24147 - DNA, 26 bp, Homo sapiens
ggtgcgagcgaggagcagatctttgg

SEQ ID NO: 24148 - DNA, 26 bp, Homo sapiens
gtgcgagcgaggagcagatctttggt

SEQ ID NO: 24149 - DNA, 26 bp, Homo sapiens
tgcgagcgaggagcagatctttggtg

SEQ ID NO: 24150 - DNA, 26 bp, Homo sapiens
gcgagcgaggagcagatctttggtga

SEQ ID NO: 24151 - DNA, 26 bp, Homo sapiens
cgagcgaggagcagatctttggtgaa

SEQ ID NO: 24152 - DNA, 26 bp, Homo sapiens
gagcgaggagcagatctttggtgaag

SEQ ID NO: 24153 - DNA, 26 bp, Homo sapiens
agcgaggagcagatctttggtgaagg

SEQ ID NO: 24154 - DNA, 26 bp, Homo sapiens
gcgaggagcagatctttggtgaagga

SEQ ID NO: 24155 - DNA, 26 bp, Homo sapiens
cgaggagcagatctttggtgaaggag

SEQ ID NO: 24156 - DNA, 26 bp, Homo sapiens
gaggagcagatctttggtgaaggagg

SEQ ID NO: 24157 - DNA, 26 bp, Homo sapiens
aggagcagatctttggtgaaggaggc

SEQ ID NO: 24158 - DNA, 26 bp, Homo sapiens
ggagcagatctttggtgaaggaggcc

SEQ ID NO: 24159 - DNA, 26 bp, Homo sapiens
gagcagatctttggtgaaggaggcca

SEQ ID NO: 24160 - DNA, 26 bp, Homo sapiens
agcagatctttggtgaaggaggccag

SEQ ID NO: 24161 - DNA, 26 bp, Homo sapiens
gcagatctttggtgaaggaggccagg

SEQ ID NO: 24162 - DNA, 26 bp, Homo sapiens
cagatctttggtgaaggaggccaggc

SEQ ID NO: 24163 - DNA, 26 bp, Homo sapiens
agatctttggtgaaggaggccaggct

SEQ ID NO: 24164 - DNA, 26 bp, Homo sapiens
gatctttggtgaaggaggccaggctc

SEQ ID NO: 24165 - DNA, 26 bp, Homo sapiens
atctttggtgaaggaggccaggctct

SEQ ID NO: 24166 - DNA, 26 bp, Homo sapiens
tctttggtgaaggaggccaggctcta

SEQ ID NO: 24167 - DNA, 26 bp, Homo sapiens
ctttggtgaaggaggccaggctctat

SEQ ID NO: 24168 - DNA, 26 bp, Homo sapiens
tttggtgaaggaggccaggctctatt

SEQ ID NO: 24169 - DNA, 26 bp, Homo sapiens
ttggtgaaggaggccaggctctattt

SEQ ID NO: 24170 - DNA, 26 bp, Homo sapiens
tggtgaaggaggccaggctctatttc

SEQ ID NO: 24171 - DNA, 26 bp, Homo sapiens
ggtgaaggaggccaggctctatttcc

SEQ ID NO: 24172 - DNA, 26 bp, Homo sapiens
gtgaaggaggccaggctctatttcca

SEQ ID NO: 24173 - DNA, 26 bp, Homo sapiens
tgaaggaggccaggctctatttccag

SEQ ID NO: 24174 - DNA, 26 bp, Homo sapiens
gaaggaggccaggctctatttccagc

SEQ ID NO: 24175 - DNA, 26 bp, Homo sapiens
aaggaggccaggctctatttccagcg

SEQ ID NO: 24176 - DNA, 26 bp, Homo sapiens
aggaggccaggctctatttccagcgc

SEQ ID NO: 24177 - DNA, 26 bp, Homo sapiens
ggaggccaggctctatttccagcgcc

SEQ ID NO: 24178 - DNA, 26 bp, Homo sapiens
gaggccaggctctatttccagcgccc

SEQ ID NO: 24179 - DNA, 26 bp, Homo sapiens
aggccaggctctatttccagcgcccg

SEQ ID NO: 24180 - DNA, 26 bp, Homo sapiens
ggccaggctctatttccagcgcccgg

SEQ ID NO: 24181 - DNA, 26 bp, Homo sapiens
gccaggctctatttccagcgcccggt

SEQ ID NO: 24182 - DNA, 26 bp, Homo sapiens
ccaggctctatttccagcgcccggtg

SEQ ID NO: 24183 - DNA, 26 bp, Homo sapiens
caggctctatttccagcgcccggtga

SEQ ID NO: 24184 - DNA, 26 bp, Homo sapiens
aggctctatttccagcgcccggtgac

SEQ ID NO: 24185 - DNA, 26 bp, Homo sapiens
ggctctatttccagcgcccggtgact

SEQ ID NO: 24186 - DNA, 26 bp, Homo sapiens
gctctatttccagcgcccggtgactt

SEQ ID NO: 24187 - DNA, 26 bp, Homo sapiens
ctctatttccagcgcccggtgacttt

SEQ ID NO: 24188 - DNA, 26 bp, Homo sapiens
tctatttccagcgcccggtgacttta

SEQ ID NO: 24189 - DNA, 26 bp, Homo sapiens
ctatttccagcgcccggtgactttag

SEQ ID NO: 24190 - DNA, 26 bp, Homo sapiens
tatttccagcgcccggtgactttagc

SEQ ID NO: 24191 - DNA, 26 bp, Homo sapiens
atttccagcgcccggtgactttagcc

SEQ ID NO: 24192 - DNA, 26 bp, Homo sapiens
tttccagcgcccggtgactttagcct

SEQ ID NO: 24193 - DNA, 26 bp, Homo sapiens
ttccagcgcccggtgactttagcctt

SEQ ID NO: 24194 - DNA, 26 bp, Homo sapiens
tccagcgcccggtgactttagccttc

SEQ ID NO: 24195 - DNA, 26 bp, Homo sapiens
ccagcgcccggtgactttagccttcc

SEQ ID NO: 24196 - DNA, 26 bp, Homo sapiens
cagcgcccggtgactttagccttccc

SEQ ID NO: 24197 - DNA, 26 bp, Homo sapiens
agcgcccggtgactttagccttcccg

SEQ ID NO: 24198 - DNA, 26 bp, Homo sapiens
gcgcccggtgactttagccttcccgc

SEQ ID NO: 24199 - DNA, 26 bp, Homo sapiens
cgcccggtgactttagccttcccgcg

SEQ ID NO: 24200 - DNA, 26 bp, Homo sapiens
gcccggtgactttagccttcccgcgg

SEQ ID NO: 24201 - DNA, 26 bp, Homo sapiens
cccggtgactttagccttcccgcggg

SEQ ID NO: 24202 - DNA, 26 bp, Homo sapiens
ccggtgactttagccttcccgcgggt

SEQ ID NO: 24203 - DNA, 26 bp, Homo sapiens
cggtgactttagccttcccgcgggtc

SEQ ID NO: 24204 - DNA, 26 bp, Homo sapiens
ggtgactttagccttcccgcgggtct

SEQ ID NO: 24205 - DNA, 26 bp, Homo sapiens
gtgactttagccttcccgcgggtctt

SEQ ID NO: 24206 - DNA, 26 bp, Homo sapiens
tgactttagccttcccgcgggtcttg

SEQ ID NO: 24207 - DNA, 26 bp, Homo sapiens
gactttagccttcccgcgggtcttgg

SEQ ID NO: 24208 - DNA, 26 bp, Homo sapiens
actttagccttcccgcgggtcttgga

SEQ ID NO: 24209 - DNA, 26 bp, Homo sapiens
ctttagccttcccgcgggtcttggag

SEQ ID NO: 24210 - DNA, 26 bp, Homo sapiens
tttagccttcccgcgggtcttggaga

SEQ ID NO: 24211 - DNA, 26 bp, Homo sapiens
ttagccttcccgcgggtcttggagac

SEQ ID NO: 24212 - DNA, 26 bp, Homo sapiens
tagccttcccgcgggtcttggagact

SEQ ID NO: 24213 - DNA, 26 bp, Homo sapiens
agccttcccgcgggtcttggagactt

SEQ ID NO: 24214 - DNA, 26 bp, Homo sapiens
gccttcccgcgggtcttggagacttt

SEQ ID NO: 24215 - DNA, 26 bp, Homo sapiens
ccttcccgcgggtcttggagactttc

SEQ ID NO: 24216 - DNA, 26 bp, Homo sapiens
cttcccgcgggtcttggagactttct

SEQ ID NO: 24217 - DNA, 26 bp, Homo sapiens
ttcccgcgggtcttggagactttctg

SEQ ID NO: 24218 - DNA, 26 bp, Homo sapiens
tcccgcgggtcttggagactttctgg

SEQ ID NO: 24219 - DNA, 26 bp, Homo sapiens
cccgcgggtcttggagactttctggt

SEQ ID NO: 24220 - DNA, 26 bp, Homo sapiens
ccgcgggtcttggagactttctggtt

SEQ ID NO: 24221 - DNA, 26 bp, Homo sapiens
cgcgggtcttggagactttctggtta

SEQ ID NO: 24222 - DNA, 26 bp, Homo sapiens
gcgggtcttggagactttctggttat

SEQ ID NO: 24223 - DNA, 26 bp, Homo sapiens
cgggtcttggagactttctggttatc

SEQ ID NO: 24224 - DNA, 26 bp, Homo sapiens
gggtcttggagactttctggttatcg

SEQ ID NO: 24225 - DNA, 26 bp, Homo sapiens
ggtcttggagactttctggttatcgt

SEQ ID NO: 24226 - DNA, 26 bp, Homo sapiens
gtcttggagactttctggttatcgtt

SEQ ID NO: 24227 - DNA, 26 bp, Homo sapiens
tcttggagactttctggttatcgttg

SEQ ID NO: 24228 - DNA, 26 bp, Homo sapiens
cttggagactttctggttatcgttga

SEQ ID NO: 24229 - DNA, 26 bp, Homo sapiens
ttggagactttctggttatcgttgat

SEQ ID NO: 24230 - DNA, 26 bp, Homo sapiens
tggagactttctggttatcgttgatc

SEQ ID NO: 24231 - DNA, 26 bp, Homo sapiens
ggagactttctggttatcgttgatcc

SEQ ID NO: 24232 - DNA, 26 bp, Homo sapiens
gagactttctggttatcgttgatcct

SEQ ID NO: 24233 - DNA, 26 bp, Homo sapiens
agactttctggttatcgttgatcctg

SEQ ID NO: 24234 - DNA, 26 bp, Homo sapiens
gactttctggttatcgttgatcctgt

SEQ ID NO: 24235 - DNA, 26 bp, Homo sapiens
actttctggttatcgttgatcctgtt

SEQ ID NO: 24236 - DNA, 26 bp, Homo sapiens
ctttctggttatcgttgatcctgttt

SEQ ID NO: 24237 - DNA, 26 bp, Homo sapiens
tttctggttatcgttgatcctgtttc

SEQ ID NO: 24238 - DNA, 26 bp, Homo sapiens
ttctggttatcgttgatcctgtttcg

SEQ ID NO: 24239 - DNA, 26 bp, Homo sapiens
tctggttatcgttgatcctgtttcgg

SEQ ID NO: 24240 - DNA, 26 bp, Homo sapiens
ctggttatcgttgatcctgtttcgga

SEQ ID NO: 24241 - DNA, 26 bp, Homo sapiens
tggttatcgttgatcctgtttcggag

SEQ ID NO: 24242 - DNA, 26 bp, Homo sapiens
ggttatcgttgatcctgtttcggaga

SEQ ID NO: 24243 - DNA, 26 bp, Homo sapiens
gttatcgttgatcctgtttcggagaa

SEQ ID NO: 24244 - DNA, 26 bp, Homo sapiens
ttatcgttgatcctgtttcggagaac

SEQ ID NO: 24245 - DNA, 26 bp, Homo sapiens
tatcgttgatcctgtttcggagaaca

SEQ ID NO: 24246 - DNA, 26 bp, Homo sapiens
atcgttgatcctgtttcggagaacat

SEQ ID NO: 24247 - DNA, 26 bp, Homo sapiens
tcgttgatcctgtttcggagaacatt

SEQ ID NO: 24248 - DNA, 26 bp, Homo sapiens
cgttgatcctgtttcggagaacattg

SEQ ID NO: 24249 - DNA, 26 bp, Homo sapiens
gttgatcctgtttcggagaacattga

SEQ ID NO: 24250 - DNA, 26 bp, Homo sapiens
ttgatcctgtttcggagaacattgat

SEQ ID NO: 24251 - DNA, 26 bp, Homo sapiens
tgatcctgtttcggagaacattgatc

SEQ ID NO: 24252 - DNA, 26 bp, Homo sapiens
gatcctgtttcggagaacattgatct

SEQ ID NO: 24253 - DNA, 26 bp, Homo sapiens
atcctgtttcggagaacattgatctc

SEQ ID NO: 24254 - DNA, 26 bp, Homo sapiens
tcctgtttcggagaacattgatctca

SEQ ID NO: 24255 - DNA, 26 bp, Homo sapiens
cctgtttcggagaacattgatctcat

SEQ ID NO: 24256 - DNA, 26 bp, Homo sapiens
ctgtttcggagaacattgatctcata

SEQ ID NO: 24257 - DNA, 26 bp, Homo sapiens
tgtttcggagaacattgatctcatat

SEQ ID NO: 24258 - DNA, 26 bp, Homo sapiens
gtttcggagaacattgatctcatatt

SEQ ID NO: 24259 - DNA, 26 bp, Homo sapiens
tttcggagaacattgatctcatattt

SEQ ID NO: 24260 - DNA, 26 bp, Homo sapiens
ttcggagaacattgatctcatatttc

SEQ ID NO: 24261 - DNA, 26 bp, Homo sapiens
tcggagaacattgatctcatatttct

SEQ ID NO: 24262 - DNA, 26 bp, Homo sapiens
cggagaacattgatctcatatttctg

SEQ ID NO: 24263 - DNA, 26 bp, Homo sapiens
ggagaacattgatctcatatttctgc

SEQ ID NO: 24264 - DNA, 26 bp, Homo sapiens
gagaacattgatctcatatttctgct

SEQ ID NO: 24265 - DNA, 26 bp, Homo sapiens
agaacattgatctcatatttctgctg

SEQ ID NO: 24266 - DNA, 26 bp, Homo sapiens
gaacattgatctcatatttctgctgc

SEQ ID NO: 24267 - DNA, 26 bp, Homo sapiens
aacattgatctcatatttctgctgct

SEQ ID NO: 24268 - DNA, 26 bp, Homo sapiens
acattgatctcatatttctgctgctt

SEQ ID NO: 24269 - DNA, 26 bp, Homo sapiens
cattgatctcatatttctgctgcttg

SEQ ID NO: 24270 - DNA, 26 bp, Homo sapiens
attgatctcatatttctgctgcttga

SEQ ID NO: 24271 - DNA, 26 bp, Homo sapiens
ttgatctcatatttctgctgcttgaa

SEQ ID NO: 24272 - DNA, 26 bp, Homo sapiens
tgatctcatatttctgctgcttgaac

SEQ ID NO: 24273 - DNA, 26 bp, Homo sapiens
gatctcatatttctgctgcttgaact

SEQ ID NO: 24274 - DNA, 26 bp, Homo sapiens
atctcatatttctgctgcttgaactt

SEQ ID NO: 24275 - DNA, 26 bp, Homo sapiens
tctcatatttctgctgcttgaacttc

SEQ ID NO: 24276 - DNA, 26 bp, Homo sapiens
ctcatatttctgctgcttgaacttct

SEQ ID NO: 24277 - DNA, 26 bp, Homo sapiens
tcatatttctgctgcttgaacttctc

SEQ ID NO: 24278 - DNA, 26 bp, Homo sapiens
catatttctgctgcttgaacttctcc

SEQ ID NO: 24279 - DNA, 26 bp, Homo sapiens
atatttctgctgcttgaacttctcct

SEQ ID NO: 24280 - DNA, 26 bp, Homo sapiens
tatttctgctgcttgaacttctcctg

SEQ ID NO: 24281 - DNA, 26 bp, Homo sapiens
atttctgctgcttgaacttctcctgc

SEQ ID NO: 24282 - DNA, 26 bp, Homo sapiens
tttctgctgcttgaacttctcctgca

SEQ ID NO: 24283 - DNA, 26 bp, Homo sapiens
ttctgctgcttgaacttctcctgcag

SEQ ID NO: 24284 - DNA, 26 bp, Homo sapiens
tctgctgcttgaacttctcctgcagg

SEQ ID NO: 24285 - DNA, 26 bp, Homo sapiens
ctgctgcttgaacttctcctgcaggt

SEQ ID NO: 24286 - DNA, 26 bp, Homo sapiens
tgctgcttgaacttctcctgcaggtc

SEQ ID NO: 24287 - DNA, 26 bp, Homo sapiens
gctgcttgaacttctcctgcaggtcg

SEQ ID NO: 24288 - DNA, 26 bp, Homo sapiens
ctgcttgaacttctcctgcaggtcga

SEQ ID NO: 24289 - DNA, 26 bp, Homo sapiens
tgcttgaacttctcctgcaggtcgaa

SEQ ID NO: 24290 - DNA, 26 bp, Homo sapiens
gcttgaacttctcctgcaggtcgaac

SEQ ID NO: 24291 - DNA, 26 bp, Homo sapiens
cttgaacttctcctgcaggtcgaact

SEQ ID NO: 24292 - DNA, 26 bp, Homo sapiens
ttgaacttctcctgcaggtcgaactt

SEQ ID NO: 24293 - DNA, 26 bp, Homo sapiens
tgaacttctcctgcaggtcgaacttc

SEQ ID NO: 24294 - DNA, 26 bp, Homo sapiens
gaacttctcctgcaggtcgaacttct

SEQ ID NO: 24295 - DNA, 26 bp, Homo sapiens
aacttctcctgcaggtcgaacttctc

SEQ ID NO: 24296 - DNA, 26 bp, Homo sapiens
acttctcctgcaggtcgaacttctct

SEQ ID NO: 24297 - DNA, 26 bp, Homo sapiens
cttctcctgcaggtcgaacttctctg

SEQ ID NO: 24298 - DNA, 26 bp, Homo sapiens
ttctcctgcaggtcgaacttctctgc

SEQ ID NO: 24299 - DNA, 26 bp, Homo sapiens
tctcctgcaggtcgaacttctctgcc

SEQ ID NO: 24300 - DNA, 26 bp, Homo sapiens
ctcctgcaggtcgaacttctctgcct

SEQ ID NO: 24301 - DNA, 26 bp, Homo sapiens
tcctgcaggtcgaacttctctgcctc

SEQ ID NO: 24302 - DNA, 26 bp, Homo sapiens
cctgcaggtcgaacttctctgcctcc

SEQ ID NO: 24303 - DNA, 26 bp, Homo sapiens
ctgcaggtcgaacttctctgcctcca

SEQ ID NO: 24304 - DNA, 26 bp, Homo sapiens
tgcaggtcgaacttctctgcctccaa

SEQ ID NO: 24305 - DNA, 26 bp, Homo sapiens
gcaggtcgaacttctctgcctccaag

SEQ ID NO: 24306 - DNA, 26 bp, Homo sapiens
caggtcgaacttctctgcctccaagt

SEQ ID NO: 24307 - DNA, 26 bp, Homo sapiens
aggtcgaacttctctgcctccaagtt

SEQ ID NO: 24308 - DNA, 26 bp, Homo sapiens
ggtcgaacttctctgcctccaagtta

SEQ ID NO: 24309 - DNA, 26 bp, Homo sapiens
gtcgaacttctctgcctccaagttat

SEQ ID NO: 24310 - DNA, 26 bp, Homo sapiens
tcgaacttctctgcctccaagttata

SEQ ID NO: 24311 - DNA, 26 bp, Homo sapiens
cgaacttctctgcctccaagttatag

SEQ ID NO: 24312 - DNA, 26 bp, Homo sapiens
gaacttctctgcctccaagttataga

SEQ ID NO: 24313 - DNA, 26 bp, Homo sapiens
aacttctctgcctccaagttatagat

SEQ ID NO: 24314 - DNA, 26 bp, Homo sapiens
acttctctgcctccaagttatagatg

SEQ ID NO: 24315 - DNA, 26 bp, Homo sapiens
cttctctgcctccaagttatagatgc

SEQ ID NO: 24316 - DNA, 26 bp, Homo sapiens
ttctctgcctccaagttatagatgct

SEQ ID NO: 24317 - DNA, 26 bp, Homo sapiens
tctctgcctccaagttatagatgctc

SEQ ID NO: 24318 - DNA, 26 bp, Homo sapiens
ctctgcctccaagttatagatgctct

SEQ ID NO: 24319 - DNA, 26 bp, Homo sapiens
tctgcctccaagttatagatgctctg

SEQ ID NO: 24320 - DNA, 26 bp, Homo sapiens
ctgcctccaagttatagatgctctgc

SEQ ID NO: 24321 - DNA, 26 bp, Homo sapiens
tgcctccaagttatagatgctctgcc

SEQ ID NO: 24322 - DNA, 26 bp, Homo sapiens
gcctccaagttatagatgctctgcca

SEQ ID NO: 24323 - DNA, 26 bp, Homo sapiens
cctccaagttatagatgctctgccac

SEQ ID NO: 24324 - DNA, 26 bp, Homo sapiens
ctccaagttatagatgctctgccaca

SEQ ID NO: 24325 - DNA, 26 bp, Homo sapiens
tccaagttatagatgctctgccacag

SEQ ID NO: 24326 - DNA, 26 bp, Homo sapiens
ccaagttatagatgctctgccacagc

SEQ ID NO: 24327 - DNA, 26 bp, Homo sapiens
caagttatagatgctctgccacagct

SEQ ID NO: 24328 - DNA, 26 bp, Homo sapiens
aagttatagatgctctgccacagctc

SEQ ID NO: 24329 - DNA, 26 bp, Homo sapiens
agttatagatgctctgccacagctcc

SEQ ID NO: 24330 - DNA, 26 bp, Homo sapiens
gttatagatgctctgccacagctcct

SEQ ID NO: 24331 - DNA, 26 bp, Homo sapiens
ttatagatgctctgccacagctcctt

SEQ ID NO: 24332 - DNA, 26 bp, Homo sapiens
tatagatgctctgccacagctccttg

SEQ ID NO: 24333 - DNA, 26 bp, Homo sapiens
atagatgctctgccacagctccttgg

SEQ ID NO: 24334 - DNA, 26 bp, Homo sapiens
tagatgctctgccacagctccttggc

SEQ ID NO: 24335 - DNA, 26 bp, Homo sapiens
agatgctctgccacagctccttggcc

SEQ ID NO: 24336 - DNA, 26 bp, Homo sapiens
gatgctctgccacagctccttggcct

SEQ ID NO: 24337 - DNA, 26 bp, Homo sapiens
atgctctgccacagctccttggcctt

SEQ ID NO: 24338 - DNA, 26 bp, Homo sapiens
tgctctgccacagctccttggccttc

SEQ ID NO: 24339 - DNA, 26 bp, Homo sapiens
gctctgccacagctccttggccttct

SEQ ID NO: 24340 - DNA, 26 bp, Homo sapiens
ctctgccacagctccttggccttctc

SEQ ID NO: 24341 - DNA, 26 bp, Homo sapiens
tctgccacagctccttggccttctcc

SEQ ID NO: 24342 - DNA, 26 bp, Homo sapiens
ctgccacagctccttggccttctccc

SEQ ID NO: 24343 - DNA, 26 bp, Homo sapiens
tgccacagctccttggccttctccct

SEQ ID NO: 24344 - DNA, 26 bp, Homo sapiens
gccacagctccttggccttctccctc

SEQ ID NO: 24345 - DNA, 26 bp, Homo sapiens
ccacagctccttggccttctccctca

SEQ ID NO: 24346 - DNA, 26 bp, Homo sapiens
cacagctccttggccttctccctcag

SEQ ID NO: 24347 - DNA, 26 bp, Homo sapiens
acagctccttggccttctccctcagc

SEQ ID NO: 24348 - DNA, 26 bp, Homo sapiens
cagctccttggccttctccctcagct

SEQ ID NO: 24349 - DNA, 26 bp, Homo sapiens
agctccttggccttctccctcagctg

SEQ ID NO: 24350 - DNA, 26 bp, Homo sapiens
gctccttggccttctccctcagctga

SEQ ID NO: 24351 - DNA, 26 bp, Homo sapiens
ctccttggccttctccctcagctgat

SEQ ID NO: 24352 - DNA, 26 bp, Homo sapiens
tccttggccttctccctcagctgatc

SEQ ID NO: 24353 - DNA, 26 bp, Homo sapiens
ccttggccttctccctcagctgatct

SEQ ID NO: 24354 - DNA, 26 bp, Homo sapiens
cttggccttctccctcagctgatctt

SEQ ID NO: 24355 - DNA, 26 bp, Homo sapiens
ttggccttctccctcagctgatcttc

SEQ ID NO: 24356 - DNA, 26 bp, Homo sapiens
tggccttctccctcagctgatcttca

SEQ ID NO: 24357 - DNA, 26 bp, Homo sapiens
ggccttctccctcagctgatcttcat

SEQ ID NO: 24358 - DNA, 26 bp, Homo sapiens
gccttctccctcagctgatcttcatt

SEQ ID NO: 24359 - DNA, 26 bp, Homo sapiens
ccttctccctcagctgatcttcattc

SEQ ID NO: 24360 - DNA, 26 bp, Homo sapiens
cttctccctcagctgatcttcattca

SEQ ID NO: 24361 - DNA, 26 bp, Homo sapiens
ttctccctcagctgatcttcattcag

SEQ ID NO: 24362 - DNA, 26 bp, Homo sapiens
tctccctcagctgatcttcattcagg

SEQ ID NO: 24363 - DNA, 26 bp, Homo sapiens
ctccctcagctgatcttcattcaggt

SEQ ID NO: 24364 - DNA, 26 bp, Homo sapiens
tccctcagctgatcttcattcaggtg

SEQ ID NO: 24365 - DNA, 26 bp, Homo sapiens
ccctcagctgatcttcattcaggtgg

SEQ ID NO: 24366 - DNA, 26 bp, Homo sapiens
cctcagctgatcttcattcaggtggt

SEQ ID NO: 24367 - DNA, 26 bp, Homo sapiens
ctcagctgatcttcattcaggtggtc

SEQ ID NO: 24368 - DNA, 26 bp, Homo sapiens
tcagctgatcttcattcaggtggtca

SEQ ID NO: 24369 - DNA, 26 bp, Homo sapiens
cagctgatcttcattcaggtggtcaa

SEQ ID NO: 24370 - DNA, 26 bp, Homo sapiens
agctgatcttcattcaggtggtcaat

SEQ ID NO: 24371 - DNA, 26 bp, Homo sapiens
gctgatcttcattcaggtggtcaatg

SEQ ID NO: 24372 - DNA, 26 bp, Homo sapiens
ctgatcttcattcaggtggtcaatgg

SEQ ID NO: 24373 - DNA, 26 bp, Homo sapiens
tgatcttcattcaggtggtcaatggc

SEQ ID NO: 24374 - DNA, 26 bp, Homo sapiens
gatcttcattcaggtggtcaatggcc

SEQ ID NO: 24375 - DNA, 26 bp, Homo sapiens
atcttcattcaggtggtcaatggcca

SEQ ID NO: 24376 - DNA, 26 bp, Homo sapiens
tcttcattcaggtggtcaatggccag

SEQ ID NO: 24377 - DNA, 26 bp, Homo sapiens
cttcattcaggtggtcaatggccagc

SEQ ID NO: 24378 - DNA, 26 bp, Homo sapiens
ttcattcaggtggtcaatggccagca

SEQ ID NO: 24379 - DNA, 26 bp, Homo sapiens
tcattcaggtggtcaatggccagcac

SEQ ID NO: 24380 - DNA, 26 bp, Homo sapiens
cattcaggtggtcaatggccagcacc

SEQ ID NO: 24381 - DNA, 26 bp, Homo sapiens
attcaggtggtcaatggccagcacct

SEQ ID NO: 24382 - DNA, 26 bp, Homo sapiens
ttcaggtggtcaatggccagcacctt

SEQ ID NO: 24383 - DNA, 26 bp, Homo sapiens
tcaggtggtcaatggccagcaccttc

SEQ ID NO: 24384 - DNA, 26 bp, Homo sapiens
caggtggtcaatggccagcaccttcc

SEQ ID NO: 24385 - DNA, 26 bp, Homo sapiens
aggtggtcaatggccagcaccttcct

SEQ ID NO: 24386 - DNA, 26 bp, Homo sapiens
ggtggtcaatggccagcaccttcctc

SEQ ID NO: 24387 - DNA, 26 bp, Homo sapiens
gtggtcaatggccagcaccttcctcc

SEQ ID NO: 24388 - DNA, 26 bp, Homo sapiens
tggtcaatggccagcaccttcctcct

SEQ ID NO: 24389 - DNA, 26 bp, Homo sapiens
ggtcaatggccagcaccttcctcctc

SEQ ID NO: 24390 - DNA, 26 bp, Homo sapiens
gtcaatggccagcaccttcctcctct

SEQ ID NO: 24391 - DNA, 26 bp, Homo sapiens
tcaatggccagcaccttcctcctctc

SEQ ID NO: 24392 - DNA, 26 bp, Homo sapiens
caatggccagcaccttcctcctctca

SEQ ID NO: 24393 - DNA, 26 bp, Homo sapiens
aatggccagcaccttcctcctctcag

SEQ ID NO: 24394 - DNA, 26 bp, Homo sapiens
atggccagcaccttcctcctctcagc

SEQ ID NO: 24395 - DNA, 26 bp, Homo sapiens
tggccagcaccttcctcctctcagcc

SEQ ID NO: 24396 - DNA, 26 bp, Homo sapiens
ggccagcaccttcctcctctcagcca

SEQ ID NO: 24397 - DNA, 26 bp, Homo sapiens
gccagcaccttcctcctctcagccag

SEQ ID NO: 24398 - DNA, 26 bp, Homo sapiens
ccagcaccttcctcctctcagccaga

SEQ ID NO: 24399 - DNA, 26 bp, Homo sapiens
cagcaccttcctcctctcagccagaa

SEQ ID NO: 24400 - DNA, 26 bp, Homo sapiens
agcaccttcctcctctcagccagaat

SEQ ID NO: 24401 - DNA, 26 bp, Homo sapiens
gcaccttcctcctctcagccagaatc

SEQ ID NO: 24402 - DNA, 26 bp, Homo sapiens
caccttcctcctctcagccagaatct

SEQ ID NO: 24403 - DNA, 26 bp, Homo sapiens
accttcctcctctcagccagaatctt

SEQ ID NO: 24404 - DNA, 26 bp, Homo sapiens
ccttcctcctctcagccagaatcttc

SEQ ID NO: 24405 - DNA, 26 bp, Homo sapiens
cttcctcctctcagccagaatcttct

SEQ ID NO: 24406 - DNA, 26 bp, Homo sapiens
ttcctcctctcagccagaatcttctt

SEQ ID NO: 24407 - DNA, 26 bp, Homo sapiens
tcctcctctcagccagaatcttcttc

SEQ ID NO: 24408 - DNA, 26 bp, Homo sapiens
cctcctctcagccagaatcttcttct

SEQ ID NO: 24409 - DNA, 26 bp, Homo sapiens
ctcctctcagccagaatcttcttctt

SEQ ID NO: 24410 - DNA, 26 bp, Homo sapiens
tcctctcagccagaatcttcttcttc

SEQ ID NO: 24411 - DNA, 26 bp, Homo sapiens
cctctcagccagaatcttcttcttct

SEQ ID NO: 24412 - DNA, 26 bp, Homo sapiens
ctctcagccagaatcttcttcttctt

SEQ ID NO: 24413 - DNA, 26 bp, Homo sapiens
tctcagccagaatcttcttcttcttt

SEQ ID NO: 24414 - DNA, 26 bp, Homo sapiens
ctcagccagaatcttcttcttctttt

SEQ ID NO: 24415 - DNA, 26 bp, Homo sapiens
tcagccagaatcttcttcttcttttc

SEQ ID NO: 24416 - DNA, 26 bp, Homo sapiens
cagccagaatcttcttcttcttttcc

SEQ ID NO: 24417 - DNA, 26 bp, Homo sapiens
agccagaatcttcttcttcttttccc

SEQ ID NO: 24418 - DNA, 26 bp, Homo sapiens
gccagaatcttcttcttcttttcccg

SEQ ID NO: 24419 - DNA, 26 bp, Homo sapiens
ccagaatcttcttcttcttttcccgc

SEQ ID NO: 24420 - DNA, 26 bp, Homo sapiens
cagaatcttcttcttcttttcccgct

SEQ ID NO: 24421 - DNA, 26 bp, Homo sapiens
agaatcttcttcttcttttcccgctc

SEQ ID NO: 24422 - DNA, 26 bp, Homo sapiens
gaatcttcttcttcttttcccgctca

SEQ ID NO: 24423 - DNA, 26 bp, Homo sapiens
aatcttcttcttcttttcccgctcag

SEQ ID NO: 24424 - DNA, 26 bp, Homo sapiens
atcttcttcttcttttcccgctcagt

SEQ ID NO: 24425 - DNA, 26 bp, Homo sapiens
tcttcttcttcttttcccgctcagtc

SEQ ID NO: 24426 - DNA, 26 bp, Homo sapiens
cttcttcttcttttcccgctcagtct

SEQ ID NO: 24427 - DNA, 26 bp, Homo sapiens
ttcttcttcttttcccgctcagtctg

SEQ ID NO: 24428 - DNA, 26 bp, Homo sapiens
tcttcttcttttcccgctcagtctgc

SEQ ID NO: 24429 - DNA, 26 bp, Homo sapiens
cttcttcttttcccgctcagtctgcc

SEQ ID NO: 24430 - DNA, 26 bp, Homo sapiens
ttcttcttttcccgctcagtctgcct

SEQ ID NO: 24431 - DNA, 26 bp, Homo sapiens
tcttcttttcccgctcagtctgcctc

SEQ ID NO: 24432 - DNA, 26 bp, Homo sapiens
cttcttttcccgctcagtctgcctct

SEQ ID NO: 24433 - DNA, 26 bp, Homo sapiens
ttcttttcccgctcagtctgcctctt

SEQ ID NO: 24434 - DNA, 26 bp, Homo sapiens
tcttttcccgctcagtctgcctcttc

SEQ ID NO: 24435 - DNA, 26 bp, Homo sapiens
cttttcccgctcagtctgcctcttcc

SEQ ID NO: 24436 - DNA, 26 bp, Homo sapiens
ttttcccgctcagtctgcctcttccc

SEQ ID NO: 24437 - DNA, 26 bp, Homo sapiens
tttcccgctcagtctgcctcttccca

SEQ ID NO: 24438 - DNA, 26 bp, Homo sapiens
ttcccgctcagtctgcctcttcccac

SEQ ID NO: 24439 - DNA, 26 bp, Homo sapiens
tcccgctcagtctgcctcttcccact

SEQ ID NO: 24440 - DNA, 26 bp, Homo sapiens
cccgctcagtctgcctcttcccactt

SEQ ID NO: 24441 - DNA, 26 bp, Homo sapiens
ccgctcagtctgcctcttcccacttt

SEQ ID NO: 24442 - DNA, 26 bp, Homo sapiens
cgctcagtctgcctcttcccactttt

SEQ ID NO: 24443 - DNA, 26 bp, Homo sapiens
gctcagtctgcctcttcccacttttc

SEQ ID NO: 24444 - DNA, 26 bp, Homo sapiens
ctcagtctgcctcttcccacttttcc

SEQ ID NO: 24445 - DNA, 26 bp, Homo sapiens
tcagtctgcctcttcccacttttccg

SEQ ID NO: 24446 - DNA, 26 bp, Homo sapiens
cagtctgcctcttcccacttttccgc

SEQ ID NO: 24447 - DNA, 26 bp, Homo sapiens
agtctgcctcttcccacttttccgct

SEQ ID NO: 24448 - DNA, 26 bp, Homo sapiens
gtctgcctcttcccacttttccgctc

SEQ ID NO: 24449 - DNA, 26 bp, Homo sapiens
tctgcctcttcccacttttccgctct

SEQ ID NO: 24450 - DNA, 26 bp, Homo sapiens
ctgcctcttcccacttttccgctctg

SEQ ID NO: 24451 - DNA, 26 bp, Homo sapiens
tgcctcttcccacttttccgctctgt

SEQ ID NO: 24452 - DNA, 26 bp, Homo sapiens
gcctcttcccacttttccgctctgtc

SEQ ID NO: 24453 - DNA, 26 bp, Homo sapiens
cctcttcccacttttccgctctgtct

SEQ ID NO: 24454 - DNA, 26 bp, Homo sapiens
ctcttcccacttttccgctctgtctg

SEQ ID NO: 24455 - DNA, 26 bp, Homo sapiens
tcttcccacttttccgctctgtctgg

SEQ ID NO: 24456 - DNA, 26 bp, Homo sapiens
cttcccacttttccgctctgtctggg

SEQ ID NO: 24457 - DNA, 26 bp, Homo sapiens
ttcccacttttccgctctgtctgggc

SEQ ID NO: 24458 - DNA, 26 bp, Homo sapiens
tcccacttttccgctctgtctgggcc

SEQ ID NO: 24459 - DNA, 26 bp, Homo sapiens
cccacttttccgctctgtctgggcct

SEQ ID NO: 24460 - DNA, 26 bp, Homo sapiens
ccacttttccgctctgtctgggcctg

SEQ ID NO: 24461 - DNA, 26 bp, Homo sapiens
cacttttccgctctgtctgggcctgc

SEQ ID NO: 24462 - DNA, 26 bp, Homo sapiens
acttttccgctctgtctgggcctgct

SEQ ID NO: 24463 - DNA, 26 bp, Homo sapiens
cttttccgctctgtctgggcctgctt

SEQ ID NO: 24464 - DNA, 26 bp, Homo sapiens
ttttccgctctgtctgggcctgcttc

SEQ ID NO: 24465 - DNA, 26 bp, Homo sapiens
tttccgctctgtctgggcctgcttct

SEQ ID NO: 24466 - DNA, 26 bp, Homo sapiens
ttccgctctgtctgggcctgcttctg

SEQ ID NO: 24467 - DNA, 26 bp, Homo sapiens
tccgctctgtctgggcctgcttctgg

SEQ ID NO: 24468 - DNA, 26 bp, Homo sapiens
ccgctctgtctgggcctgcttctgga

SEQ ID NO: 24469 - DNA, 26 bp, Homo sapiens
cgctctgtctgggcctgcttctggat

SEQ ID NO: 24470 - DNA, 26 bp, Homo sapiens
gctctgtctgggcctgcttctggatg

SEQ ID NO: 24471 - DNA, 26 bp, Homo sapiens
ctctgtctgggcctgcttctggatgt

SEQ ID NO: 24472 - DNA, 26 bp, Homo sapiens
tctgtctgggcctgcttctggatgta

SEQ ID NO: 24473 - DNA, 26 bp, Homo sapiens
ctgtctgggcctgcttctggatgtaa

SEQ ID NO: 24474 - DNA, 26 bp, Homo sapiens
tgtctgggcctgcttctggatgtaac

SEQ ID NO: 24475 - DNA, 26 bp, Homo sapiens
gtctgggcctgcttctggatgtaacc

SEQ ID NO: 24476 - DNA, 26 bp, Homo sapiens
tctgggcctgcttctggatgtaaccc

SEQ ID NO: 24477 - DNA, 26 bp, Homo sapiens
ctgggcctgcttctggatgtaacccc

SEQ ID NO: 24478 - DNA, 26 bp, Homo sapiens
tgggcctgcttctggatgtaaccccc

SEQ ID NO: 24479 - DNA, 26 bp, Homo sapiens
gggcctgcttctggatgtaaccccca

SEQ ID NO: 24480 - DNA, 26 bp, Homo sapiens
ggcctgcttctggatgtaacccccaa

SEQ ID NO: 24481 - DNA, 26 bp, Homo sapiens
gcctgcttctggatgtaacccccaaa

SEQ ID NO: 24482 - DNA, 26 bp, Homo sapiens
cctgcttctggatgtaacccccaaaa

SEQ ID NO: 24483 - DNA, 26 bp, Homo sapiens
ctgcttctggatgtaacccccaaaat

SEQ ID NO: 24484 - DNA, 26 bp, Homo sapiens
tgcttctggatgtaacccccaaaatg

SEQ ID NO: 24485 - DNA, 26 bp, Homo sapiens
gcttctggatgtaacccccaaaatgc

SEQ ID NO: 24486 - DNA, 26 bp, Homo sapiens
cttctggatgtaacccccaaaatgca

SEQ ID NO: 24487 - DNA, 26 bp, Homo sapiens
ttctggatgtaacccccaaaatgcat

SEQ ID NO: 24488 - DNA, 26 bp, Homo sapiens
tctggatgtaacccccaaaatgcatc

SEQ ID NO: 24489 - DNA, 26 bp, Homo sapiens
ctggatgtaacccccaaaatgcatca

SEQ ID NO: 24490 - DNA, 26 bp, Homo sapiens
tggatgtaacccccaaaatgcatcat

SEQ ID NO: 24491 - DNA, 26 bp, Homo sapiens
ggatgtaacccccaaaatgcatcatg

SEQ ID NO: 24492 - DNA, 26 bp, Homo sapiens
gatgtaacccccaaaatgcatcatgt

SEQ ID NO: 24493 - DNA, 26 bp, Homo sapiens
atgtaacccccaaaatgcatcatgtt

SEQ ID NO: 24494 - DNA, 26 bp, Homo sapiens
tgtaacccccaaaatgcatcatgttg

SEQ ID NO: 24495 - DNA, 26 bp, Homo sapiens
gtaacccccaaaatgcatcatgttgg

SEQ ID NO: 24496 - DNA, 26 bp, Homo sapiens
taacccccaaaatgcatcatgttgga

SEQ ID NO: 24497 - DNA, 26 bp, Homo sapiens
aacccccaaaatgcatcatgttggac

SEQ ID NO: 24498 - DNA, 26 bp, Homo sapiens
acccccaaaatgcatcatgttggaca

SEQ ID NO: 24499 - DNA, 26 bp, Homo sapiens
cccccaaaatgcatcatgttggacaa

SEQ ID NO: 24500 - DNA, 26 bp, Homo sapiens
ccccaaaatgcatcatgttggacaaa

SEQ ID NO: 24501 - DNA, 26 bp, Homo sapiens
cccaaaatgcatcatgttggacaaag

SEQ ID NO: 24502 - DNA, 26 bp, Homo sapiens
ccaaaatgcatcatgttggacaaagc

SEQ ID NO: 24503 - DNA, 26 bp, Homo sapiens
caaaatgcatcatgttggacaaagcc

SEQ ID NO: 24504 - DNA, 26 bp, Homo sapiens
aaaatgcatcatgttggacaaagcct

SEQ ID NO: 24505 - DNA, 26 bp, Homo sapiens
aaatgcatcatgttggacaaagcctt

SEQ ID NO: 24506 - DNA, 26 bp, Homo sapiens
aatgcatcatgttggacaaagccttc

SEQ ID NO: 24507 - DNA, 26 bp, Homo sapiens
atgcatcatgttggacaaagccttct

SEQ ID NO: 24508 - DNA, 26 bp, Homo sapiens
tgcatcatgttggacaaagccttctt

SEQ ID NO: 24509 - DNA, 26 bp, Homo sapiens
gcatcatgttggacaaagccttcttc

SEQ ID NO: 24510 - DNA, 26 bp, Homo sapiens
catcatgttggacaaagccttcttct

SEQ ID NO: 24511 - DNA, 26 bp, Homo sapiens
atcatgttggacaaagccttcttctt

SEQ ID NO: 24512 - DNA, 26 bp, Homo sapiens
tcatgttggacaaagccttcttcttc

SEQ ID NO: 24513 - DNA, 26 bp, Homo sapiens
catgttggacaaagccttcttcttcc

SEQ ID NO: 24514 - DNA, 26 bp, Homo sapiens
atgttggacaaagccttcttcttccg

SEQ ID NO: 24515 - DNA, 26 bp, Homo sapiens
tgttggacaaagccttcttcttccgg

SEQ ID NO: 24516 - DNA, 26 bp, Homo sapiens
gttggacaaagccttcttcttccggg

SEQ ID NO: 24517 - DNA, 26 bp, Homo sapiens
ttggacaaagccttcttcttccgggc

SEQ ID NO: 24518 - DNA, 26 bp, Homo sapiens
tggacaaagccttcttcttccgggcc

SEQ ID NO: 24519 - DNA, 26 bp, Homo sapiens
ggacaaagccttcttcttccgggcct

SEQ ID NO: 24520 - DNA, 26 bp, Homo sapiens
gacaaagccttcttcttccgggcctc

SEQ ID NO: 24521 - DNA, 26 bp, Homo sapiens
acaaagccttcttcttccgggcctca

SEQ ID NO: 24522 - DNA, 26 bp, Homo sapiens
caaagccttcttcttccgggcctcat

SEQ ID NO: 24523 - DNA, 26 bp, Homo sapiens
aaagccttcttcttccgggcctcatc

SEQ ID NO: 24524 - DNA, 26 bp, Homo sapiens
aagccttcttcttccgggcctcatcc

SEQ ID NO: 24525 - DNA, 26 bp, Homo sapiens
agccttcttcttccgggcctcatcct

SEQ ID NO: 24526 - DNA, 26 bp, Homo sapiens
gccttcttcttccgggcctcatcctc

SEQ ID NO: 24527 - DNA, 26 bp, Homo sapiens
ccttcttcttccgggcctcatcctca

SEQ ID NO: 24528 - DNA, 26 bp, Homo sapiens
cttcttcttccgggcctcatcctcag

SEQ ID NO: 24529 - DNA, 26 bp, Homo sapiens
ttcttcttccgggcctcatcctcagc

SEQ ID NO: 24530 - DNA, 26 bp, Homo sapiens
tcttcttccgggcctcatcctcagcc

SEQ ID NO: 24531 - DNA, 26 bp, Homo sapiens
cttcttccgggcctcatcctcagcct

SEQ ID NO: 24532 - DNA, 26 bp, Homo sapiens
ttcttccgggcctcatcctcagcctt

SEQ ID NO: 24533 - DNA, 26 bp, Homo sapiens
tcttccgggcctcatcctcagccttc

SEQ ID NO: 24534 - DNA, 26 bp, Homo sapiens
cttccgggcctcatcctcagccttcc

SEQ ID NO: 24535 - DNA, 26 bp, Homo sapiens
ttccgggcctcatcctcagccttcct

SEQ ID NO: 24536 - DNA, 26 bp, Homo sapiens
tccgggcctcatcctcagccttcctc

SEQ ID NO: 24537 - DNA, 26 bp, Homo sapiens
ccgggcctcatcctcagccttcctcc

SEQ ID NO: 24538 - DNA, 26 bp, Homo sapiens
cgggcctcatcctcagccttcctcct

SEQ ID NO: 24539 - DNA, 26 bp, Homo sapiens
gggcctcatcctcagccttcctcctg

SEQ ID NO: 24540 - DNA, 26 bp, Homo sapiens
ggcctcatcctcagccttcctcctgt

SEQ ID NO: 24541 - DNA, 26 bp, Homo sapiens
gcctcatcctcagccttcctcctgtt

SEQ ID NO: 24542 - DNA, 26 bp, Homo sapiens
cctcatcctcagccttcctcctgttc

SEQ ID NO: 24543 - DNA, 26 bp, Homo sapiens
ctcatcctcagccttcctcctgttct

SEQ ID NO: 24544 - DNA, 26 bp, Homo sapiens
tcatcctcagccttcctcctgttctc

SEQ ID NO: 24545 - DNA, 26 bp, Homo sapiens
catcctcagccttcctcctgttctcc

SEQ ID NO: 24546 - DNA, 26 bp, Homo sapiens
atcctcagccttcctcctgttctcct

SEQ ID NO: 24547 - DNA, 26 bp, Homo sapiens
tcctcagccttcctcctgttctcctc

SEQ ID NO: 24548 - DNA, 26 bp, Homo sapiens
cctcagccttcctcctgttctcctcc

SEQ ID NO: 24549 - DNA, 26 bp, Homo sapiens
ctcagccttcctcctgttctcctcct

SEQ ID NO: 24550 - DNA, 26 bp, Homo sapiens
tcagccttcctcctgttctcctcctc

SEQ ID NO: 24551 - DNA, 26 bp, Homo sapiens
cagccttcctcctgttctcctcctcc

SEQ ID NO: 24552 - DNA, 26 bp, Homo sapiens
agccttcctcctgttctcctcctcct

SEQ ID NO: 24553 - DNA, 26 bp, Homo sapiens
gccttcctcctgttctcctcctcctc

SEQ ID NO: 24554 - DNA, 26 bp, Homo sapiens
ccttcctcctgttctcctcctcctct

SEQ ID NO: 24555 - DNA, 26 bp, Homo sapiens
cttcctcctgttctcctcctcctctc

SEQ ID NO: 24556 - DNA, 26 bp, Homo sapiens
ttcctcctgttctcctcctcctctcg

SEQ ID NO: 24557 - DNA, 26 bp, Homo sapiens
tcctcctgttctcctcctcctctcgt

SEQ ID NO: 24558 - DNA, 26 bp, Homo sapiens
cctcctgttctcctcctcctctcgtc

SEQ ID NO: 24559 - DNA, 26 bp, Homo sapiens
ctcctgttctcctcctcctctcgtcg

SEQ ID NO: 24560 - DNA, 26 bp, Homo sapiens
tcctgttctcctcctcctctcgtcga

SEQ ID NO: 24561 - DNA, 26 bp, Homo sapiens
cctgttctcctcctcctctcgtcgag

SEQ ID NO: 24562 - DNA, 26 bp, Homo sapiens
ctgttctcctcctcctctcgtcgagc

SEQ ID NO: 24563 - DNA, 26 bp, Homo sapiens
tgttctcctcctcctctcgtcgagcc

SEQ ID NO: 24564 - DNA, 26 bp, Homo sapiens
gttctcctcctcctctcgtcgagccc

SEQ ID NO: 24565 - DNA, 26 bp, Homo sapiens
ttctcctcctcctctcgtcgagccct

SEQ ID NO: 24566 - DNA, 26 bp, Homo sapiens
tctcctcctcctctcgtcgagccctc

SEQ ID NO: 24567 - DNA, 26 bp, Homo sapiens
ctcctcctcctctcgtcgagccctct

SEQ ID NO: 24568 - DNA, 26 bp, Homo sapiens
tcctcctcctctcgtcgagccctctc

SEQ ID NO: 24569 - DNA, 26 bp, Homo sapiens
cctcctcctctcgtcgagccctctct

SEQ ID NO: 24570 - DNA, 26 bp, Homo sapiens
ctcctcctctcgtcgagccctctctt

SEQ ID NO: 24571 - DNA, 26 bp, Homo sapiens
tcctcctctcgtcgagccctctcttc

SEQ ID NO: 24572 - DNA, 26 bp, Homo sapiens
cctcctctcgtcgagccctctcttca

SEQ ID NO: 24573 - DNA, 26 bp, Homo sapiens
ctcctctcgtcgagccctctcttcag

SEQ ID NO: 24574 - DNA, 26 bp, Homo sapiens
tcctctcgtcgagccctctcttcagc

SEQ ID NO: 24575 - DNA, 26 bp, Homo sapiens
cctctcgtcgagccctctcttcagcc

SEQ ID NO: 24576 - DNA, 26 bp, Homo sapiens
ctctcgtcgagccctctcttcagcca

SEQ ID NO: 24577 - DNA, 26 bp, Homo sapiens
tctcgtcgagccctctcttcagccag

SEQ ID NO: 24578 - DNA, 26 bp, Homo sapiens
ctcgtcgagccctctcttcagccagg

SEQ ID NO: 24579 - DNA, 26 bp, Homo sapiens
tcgtcgagccctctcttcagccaggc

SEQ ID NO: 24580 - DNA, 26 bp, Homo sapiens
cgtcgagccctctcttcagccaggcg

SEQ ID NO: 24581 - DNA, 26 bp, Homo sapiens
gtcgagccctctcttcagccaggcgg

SEQ ID NO: 24582 - DNA, 26 bp, Homo sapiens
tcgagccctctcttcagccaggcggt

SEQ ID NO: 24583 - DNA, 26 bp, Homo sapiens
cgagccctctcttcagccaggcggtt

SEQ ID NO: 24584 - DNA, 26 bp, Homo sapiens
gagccctctcttcagccaggcggttc

SEQ ID NO: 24585 - DNA, 26 bp, Homo sapiens
agccctctcttcagccaggcggttct

SEQ ID NO: 24586 - DNA, 26 bp, Homo sapiens
gccctctcttcagccaggcggttctg

SEQ ID NO: 24587 - DNA, 26 bp, Homo sapiens
ccctctcttcagccaggcggttctgc

SEQ ID NO: 24588 - DNA, 26 bp, Homo sapiens
cctctcttcagccaggcggttctgcc

SEQ ID NO: 24589 - DNA, 26 bp, Homo sapiens
ctctcttcagccaggcggttctgccg

SEQ ID NO: 24590 - DNA, 26 bp, Homo sapiens
tctcttcagccaggcggttctgccgc

SEQ ID NO: 24591 - DNA, 26 bp, Homo sapiens
ctcttcagccaggcggttctgccgct

SEQ ID NO: 24592 - DNA, 26 bp, Homo sapiens
tcttcagccaggcggttctgccgctc

SEQ ID NO: 24593 - DNA, 26 bp, Homo sapiens
cttcagccaggcggttctgccgctcc

SEQ ID NO: 24594 - DNA, 26 bp, Homo sapiens
ttcagccaggcggttctgccgctcct

SEQ ID NO: 24595 - DNA, 26 bp, Homo sapiens
tcagccaggcggttctgccgctcctt

SEQ ID NO: 24596 - DNA, 26 bp, Homo sapiens
cagccaggcggttctgccgctccttc

SEQ ID NO: 24597 - DNA, 26 bp, Homo sapiens
agccaggcggttctgccgctccttct

SEQ ID NO: 24598 - DNA, 26 bp, Homo sapiens
gccaggcggttctgccgctccttctc

SEQ ID NO: 24599 - DNA, 26 bp, Homo sapiens
ccaggcggttctgccgctccttctcc

SEQ ID NO: 24600 - DNA, 26 bp, Homo sapiens
caggcggttctgccgctccttctccc

SEQ ID NO: 24601 - DNA, 26 bp, Homo sapiens
aggcggttctgccgctccttctcccg

SEQ ID NO: 24602 - DNA, 26 bp, Homo sapiens
ggcggttctgccgctccttctcccgc

SEQ ID NO: 24603 - DNA, 26 bp, Homo sapiens
gcggttctgccgctccttctcccgct

SEQ ID NO: 24604 - DNA, 26 bp, Homo sapiens
cggttctgccgctccttctcccgctc

SEQ ID NO: 24605 - DNA, 26 bp, Homo sapiens
ggttctgccgctccttctcccgctca

SEQ ID NO: 24606 - DNA, 26 bp, Homo sapiens
gttctgccgctccttctcccgctcat

SEQ ID NO: 24607 - DNA, 26 bp, Homo sapiens
ttctgccgctccttctcccgctcatt

SEQ ID NO: 24608 - DNA, 26 bp, Homo sapiens
tctgccgctccttctcccgctcattc

SEQ ID NO: 24609 - DNA, 26 bp, Homo sapiens
ctgccgctccttctcccgctcattcc

SEQ ID NO: 24610 - DNA, 26 bp, Homo sapiens
tgccgctccttctcccgctcattccg

SEQ ID NO: 24611 - DNA, 26 bp, Homo sapiens
gccgctccttctcccgctcattccgg

SEQ ID NO: 24612 - DNA, 26 bp, Homo sapiens
ccgctccttctcccgctcattccgga

SEQ ID NO: 24613 - DNA, 26 bp, Homo sapiens
cgctccttctcccgctcattccggat

SEQ ID NO: 24614 - DNA, 26 bp, Homo sapiens
gctccttctcccgctcattccggatg

SEQ ID NO: 24615 - DNA, 26 bp, Homo sapiens
ctccttctcccgctcattccggatgc

SEQ ID NO: 24616 - DNA, 26 bp, Homo sapiens
tccttctcccgctcattccggatgcg

SEQ ID NO: 24617 - DNA, 26 bp, Homo sapiens
ccttctcccgctcattccggatgcgc

SEQ ID NO: 24618 - DNA, 26 bp, Homo sapiens
cttctcccgctcattccggatgcgct

SEQ ID NO: 24619 - DNA, 26 bp, Homo sapiens
ttctcccgctcattccggatgcgctg

SEQ ID NO: 24620 - DNA, 26 bp, Homo sapiens
tctcccgctcattccggatgcgctgc

SEQ ID NO: 24621 - DNA, 26 bp, Homo sapiens
ctcccgctcattccggatgcgctgct

SEQ ID NO: 24622 - DNA, 26 bp, Homo sapiens
tcccgctcattccggatgcgctgctg

SEQ ID NO: 24623 - DNA, 26 bp, Homo sapiens
cccgctcattccggatgcgctgctgc

SEQ ID NO: 24624 - DNA, 26 bp, Homo sapiens
ccgctcattccggatgcgctgctgct

SEQ ID NO: 24625 - DNA, 26 bp, Homo sapiens
cgctcattccggatgcgctgctgctc

SEQ ID NO: 24626 - DNA, 26 bp, Homo sapiens
gctcattccggatgcgctgctgctcg

SEQ ID NO: 24627 - DNA, 26 bp, Homo sapiens
ctcattccggatgcgctgctgctcgg

SEQ ID NO: 24628 - DNA, 26 bp, Homo sapiens
tcattccggatgcgctgctgctcggc

SEQ ID NO: 24629 - DNA, 26 bp, Homo sapiens
cattccggatgcgctgctgctcggcc

SEQ ID NO: 24630 - DNA, 26 bp, Homo sapiens
attccggatgcgctgctgctcggccc

SEQ ID NO: 24631 - DNA, 26 bp, Homo sapiens
ttccggatgcgctgctgctcggcccg

SEQ ID NO: 24632 - DNA, 26 bp, Homo sapiens
tccggatgcgctgctgctcggcccgc

SEQ ID NO: 24633 - DNA, 26 bp, Homo sapiens
ccggatgcgctgctgctcggcccgct

SEQ ID NO: 24634 - DNA, 26 bp, Homo sapiens
cggatgcgctgctgctcggcccgctc

SEQ ID NO: 24635 - DNA, 26 bp, Homo sapiens
ggatgcgctgctgctcggcccgctct

SEQ ID NO: 24636 - DNA, 26 bp, Homo sapiens
gatgcgctgctgctcggcccgctctg

SEQ ID NO: 24637 - DNA, 26 bp, Homo sapiens
atgcgctgctgctcggcccgctctgc

SEQ ID NO: 24638 - DNA, 26 bp, Homo sapiens
tgcgctgctgctcggcccgctctgcc

SEQ ID NO: 24639 - DNA, 26 bp, Homo sapiens
gcgctgctgctcggcccgctctgccc

SEQ ID NO: 24640 - DNA, 26 bp, Homo sapiens
cgctgctgctcggcccgctctgcccg

SEQ ID NO: 24641 - DNA, 26 bp, Homo sapiens
gctgctgctcggcccgctctgcccga

SEQ ID NO: 24642 - DNA, 26 bp, Homo sapiens
ctgctgctcggcccgctctgcccgac

SEQ ID NO: 24643 - DNA, 26 bp, Homo sapiens
tgctgctcggcccgctctgcccgacg

SEQ ID NO: 24644 - DNA, 26 bp, Homo sapiens
gctgctcggcccgctctgcccgacgt

SEQ ID NO: 24645 - DNA, 26 bp, Homo sapiens
ctgctcggcccgctctgcccgacgtc

SEQ ID NO: 24646 - DNA, 26 bp, Homo sapiens
tgctcggcccgctctgcccgacgtct

SEQ ID NO: 24647 - DNA, 26 bp, Homo sapiens
gctcggcccgctctgcccgacgtctc

SEQ ID NO: 24648 - DNA, 26 bp, Homo sapiens
ctcggcccgctctgcccgacgtctct

SEQ ID NO: 24649 - DNA, 26 bp, Homo sapiens
tcggcccgctctgcccgacgtctctc

SEQ ID NO: 24650 - DNA, 26 bp, Homo sapiens
cggcccgctctgcccgacgtctctcg

SEQ ID NO: 24651 - DNA, 26 bp, Homo sapiens
ggcccgctctgcccgacgtctctcga

SEQ ID NO: 24652 - DNA, 26 bp, Homo sapiens
gcccgctctgcccgacgtctctcgat

SEQ ID NO: 24653 - DNA, 26 bp, Homo sapiens
cccgctctgcccgacgtctctcgatc

SEQ ID NO: 24654 - DNA, 26 bp, Homo sapiens
ccgctctgcccgacgtctctcgatcc

SEQ ID NO: 24655 - DNA, 26 bp, Homo sapiens
cgctctgcccgacgtctctcgatcct

SEQ ID NO: 24656 - DNA, 26 bp, Homo sapiens
gctctgcccgacgtctctcgatcctg

SEQ ID NO: 24657 - DNA, 26 bp, Homo sapiens
ctctgcccgacgtctctcgatcctgt

SEQ ID NO: 24658 - DNA, 26 bp, Homo sapiens
tctgcccgacgtctctcgatcctgtc

SEQ ID NO: 24659 - DNA, 26 bp, Homo sapiens
ctgcccgacgtctctcgatcctgtct

SEQ ID NO: 24660 - DNA, 26 bp, Homo sapiens
tgcccgacgtctctcgatcctgtctt

SEQ ID NO: 24661 - DNA, 26 bp, Homo sapiens
gcccgacgtctctcgatcctgtcttt

SEQ ID NO: 24662 - DNA, 26 bp, Homo sapiens
cccgacgtctctcgatcctgtctttg

SEQ ID NO: 24663 - DNA, 26 bp, Homo sapiens
ccgacgtctctcgatcctgtctttga

SEQ ID NO: 24664 - DNA, 26 bp, Homo sapiens
cgacgtctctcgatcctgtctttgag

SEQ ID NO: 24665 - DNA, 26 bp, Homo sapiens
gacgtctctcgatcctgtctttgaga

SEQ ID NO: 24666 - DNA, 26 bp, Homo sapiens
acgtctctcgatcctgtctttgagag

SEQ ID NO: 24667 - DNA, 26 bp, Homo sapiens
cgtctctcgatcctgtctttgagaga

SEQ ID NO: 24668 - DNA, 26 bp, Homo sapiens
gtctctcgatcctgtctttgagagaa

SEQ ID NO: 24669 - DNA, 26 bp, Homo sapiens
tctctcgatcctgtctttgagagaaa

SEQ ID NO: 24670 - DNA, 26 bp, Homo sapiens
ctctcgatcctgtctttgagagaaac

SEQ ID NO: 24671 - DNA, 26 bp, Homo sapiens
tctcgatcctgtctttgagagaaacg

SEQ ID NO: 24672 - DNA, 26 bp, Homo sapiens
ctcgatcctgtctttgagagaaacga

SEQ ID NO: 24673 - DNA, 26 bp, Homo sapiens
tcgatcctgtctttgagagaaacgag

SEQ ID NO: 24674 - DNA, 26 bp, Homo sapiens
cgatcctgtctttgagagaaacgagc

SEQ ID NO: 24675 - DNA, 26 bp, Homo sapiens
gatcctgtctttgagagaaacgagct

SEQ ID NO: 24676 - DNA, 26 bp, Homo sapiens
atcctgtctttgagagaaacgagctc

SEQ ID NO: 24677 - DNA, 26 bp, Homo sapiens
tcctgtctttgagagaaacgagctcc

SEQ ID NO: 24678 - DNA, 26 bp, Homo sapiens
cctgtctttgagagaaacgagctcct

SEQ ID NO: 24679 - DNA, 26 bp, Homo sapiens
ctgtctttgagagaaacgagctcctc

SEQ ID NO: 24680 - DNA, 26 bp, Homo sapiens
tgtctttgagagaaacgagctcctcc

SEQ ID NO: 24681 - DNA, 26 bp, Homo sapiens
gtctttgagagaaacgagctcctcct

SEQ ID NO: 24682 - DNA, 26 bp, Homo sapiens
tctttgagagaaacgagctcctcctc

SEQ ID NO: 24683 - DNA, 26 bp, Homo sapiens
ctttgagagaaacgagctcctcctcc

SEQ ID NO: 24684 - DNA, 26 bp, Homo sapiens
tttgagagaaacgagctcctcctcct

SEQ ID NO: 24685 - DNA, 26 bp, Homo sapiens
ttgagagaaacgagctcctcctcctc

SEQ ID NO: 24686 - DNA, 26 bp, Homo sapiens
tgagagaaacgagctcctcctcctct

SEQ ID NO: 24687 - DNA, 26 bp, Homo sapiens
gagagaaacgagctcctcctcctctt

SEQ ID NO: 24688 - DNA, 26 bp, Homo sapiens
agagaaacgagctcctcctcctcttt

SEQ ID NO: 24689 - DNA, 26 bp, Homo sapiens
gagaaacgagctcctcctcctctttc

SEQ ID NO: 24690 - DNA, 26 bp, Homo sapiens
agaaacgagctcctcctcctctttct

SEQ ID NO: 24691 - DNA, 26 bp, Homo sapiens
gaaacgagctcctcctcctctttctt

SEQ ID NO: 24692 - DNA, 26 bp, Homo sapiens
aaacgagctcctcctcctctttcttc

SEQ ID NO: 24693 - DNA, 26 bp, Homo sapiens
aacgagctcctcctcctctttcttcc

SEQ ID NO: 24694 - DNA, 26 bp, Homo sapiens
acgagctcctcctcctctttcttcct

SEQ ID NO: 24695 - DNA, 26 bp, Homo sapiens
cgagctcctcctcctctttcttcctg

SEQ ID NO: 24696 - DNA, 26 bp, Homo sapiens
gagctcctcctcctctttcttcctgt

SEQ ID NO: 24697 - DNA, 26 bp, Homo sapiens
agctcctcctcctctttcttcctgtt

SEQ ID NO: 24698 - DNA, 26 bp, Homo sapiens
gctcctcctcctctttcttcctgttc

SEQ ID NO: 24699 - DNA, 26 bp, Homo sapiens
ctcctcctcctctttcttcctgttct

SEQ ID NO: 24700 - DNA, 26 bp, Homo sapiens
tcctcctcctctttcttcctgttctc

SEQ ID NO: 24701 - DNA, 26 bp, Homo sapiens
cctcctcctctttcttcctgttctca

SEQ ID NO: 24702 - DNA, 26 bp, Homo sapiens
ctcctcctctttcttcctgttctcaa

SEQ ID NO: 24703 - DNA, 26 bp, Homo sapiens
tcctcctctttcttcctgttctcaaa

SEQ ID NO: 24704 - DNA, 26 bp, Homo sapiens
cctcctctttcttcctgttctcaaag

SEQ ID NO: 24705 - DNA, 26 bp, Homo sapiens
ctcctctttcttcctgttctcaaagt

SEQ ID NO: 24706 - DNA, 26 bp, Homo sapiens
tcctctttcttcctgttctcaaagtg

SEQ ID NO: 24707 - DNA, 26 bp, Homo sapiens
cctctttcttcctgttctcaaagtga

SEQ ID NO: 24708 - DNA, 26 bp, Homo sapiens
ctctttcttcctgttctcaaagtgag

SEQ ID NO: 24709 - DNA, 26 bp, Homo sapiens
tctttcttcctgttctcaaagtgagc

SEQ ID NO: 24710 - DNA, 26 bp, Homo sapiens
ctttcttcctgttctcaaagtgagcc

SEQ ID NO: 24711 - DNA, 26 bp, Homo sapiens
tttcttcctgttctcaaagtgagcct

SEQ ID NO: 24712 - DNA, 26 bp, Homo sapiens
ttcttcctgttctcaaagtgagcctc

SEQ ID NO: 24713 - DNA, 26 bp, Homo sapiens
tcttcctgttctcaaagtgagcctcg

SEQ ID NO: 24714 - DNA, 26 bp, Homo sapiens
cttcctgttctcaaagtgagcctcga

SEQ ID NO: 24715 - DNA, 26 bp, Homo sapiens
ttcctgttctcaaagtgagcctcgat

SEQ ID NO: 24716 - DNA, 26 bp, Homo sapiens
tcctgttctcaaagtgagcctcgatc

SEQ ID NO: 24717 - DNA, 26 bp, Homo sapiens
cctgttctcaaagtgagcctcgatca

SEQ ID NO: 24718 - DNA, 26 bp, Homo sapiens
ctgttctcaaagtgagcctcgatcag

SEQ ID NO: 24719 - DNA, 26 bp, Homo sapiens
tgttctcaaagtgagcctcgatcagc

SEQ ID NO: 24720 - DNA, 26 bp, Homo sapiens
gttctcaaagtgagcctcgatcagcg

SEQ ID NO: 24721 - DNA, 26 bp, Homo sapiens
ttctcaaagtgagcctcgatcagcgc

SEQ ID NO: 24722 - DNA, 26 bp, Homo sapiens
tctcaaagtgagcctcgatcagcgcc

SEQ ID NO: 24723 - DNA, 26 bp, Homo sapiens
ctcaaagtgagcctcgatcagcgcct

SEQ ID NO: 24724 - DNA, 26 bp, Homo sapiens
tcaaagtgagcctcgatcagcgcctg

SEQ ID NO: 24725 - DNA, 26 bp, Homo sapiens
caaagtgagcctcgatcagcgcctgc

SEQ ID NO: 24726 - DNA, 26 bp, Homo sapiens
aaagtgagcctcgatcagcgcctgca

SEQ ID NO: 24727 - DNA, 26 bp, Homo sapiens
aagtgagcctcgatcagcgcctgcaa

SEQ ID NO: 24728 - DNA, 26 bp, Homo sapiens
agtgagcctcgatcagcgcctgcaac

SEQ ID NO: 24729 - DNA, 26 bp, Homo sapiens
gtgagcctcgatcagcgcctgcaact

SEQ ID NO: 24730 - DNA, 26 bp, Homo sapiens
tgagcctcgatcagcgcctgcaactc

SEQ ID NO: 24731 - DNA, 26 bp, Homo sapiens
gagcctcgatcagcgcctgcaactca

SEQ ID NO: 24732 - DNA, 26 bp, Homo sapiens
agcctcgatcagcgcctgcaactcat

SEQ ID NO: 24733 - DNA, 26 bp, Homo sapiens
gcctcgatcagcgcctgcaactcatt

SEQ ID NO: 24734 - DNA, 26 bp, Homo sapiens
cctcgatcagcgcctgcaactcattc

SEQ ID NO: 24735 - DNA, 26 bp, Homo sapiens
ctcgatcagcgcctgcaactcattca

SEQ ID NO: 24736 - DNA, 26 bp, Homo sapiens
tcgatcagcgcctgcaactcattcag

SEQ ID NO: 24737 - DNA, 26 bp, Homo sapiens
cgatcagcgcctgcaactcattcagg

SEQ ID NO: 24738 - DNA, 26 bp, Homo sapiens
gatcagcgcctgcaactcattcaggt

SEQ ID NO: 24739 - DNA, 26 bp, Homo sapiens
atcagcgcctgcaactcattcaggtc

SEQ ID NO: 24740 - DNA, 26 bp, Homo sapiens
tcagcgcctgcaactcattcaggtcc

SEQ ID NO: 24741 - DNA, 26 bp, Homo sapiens
cagcgcctgcaactcattcaggtcct

SEQ ID NO: 24742 - DNA, 26 bp, Homo sapiens
agcgcctgcaactcattcaggtcctt

SEQ ID NO: 24743 - DNA, 26 bp, Homo sapiens
gcgcctgcaactcattcaggtccttc

SEQ ID NO: 24744 - DNA, 26 bp, Homo sapiens
cgcctgcaactcattcaggtccttct

SEQ ID NO: 24745 - DNA, 26 bp, Homo sapiens
gcctgcaactcattcaggtccttctc

SEQ ID NO: 24746 - DNA, 26 bp, Homo sapiens
cctgcaactcattcaggtccttctcc

SEQ ID NO: 24747 - DNA, 26 bp, Homo sapiens
ctgcaactcattcaggtccttctcca

SEQ ID NO: 24748 - DNA, 26 bp, Homo sapiens
tgcaactcattcaggtccttctccat

SEQ ID NO: 24749 - DNA, 26 bp, Homo sapiens
gcaactcattcaggtccttctccatg

SEQ ID NO: 24750 - DNA, 26 bp, Homo sapiens
caactcattcaggtccttctccatgc

SEQ ID NO: 24751 - DNA, 26 bp, Homo sapiens
aactcattcaggtccttctccatgcg

SEQ ID NO: 24752 - DNA, 26 bp, Homo sapiens
actcattcaggtccttctccatgcgc

SEQ ID NO: 24753 - DNA, 26 bp, Homo sapiens
ctcattcaggtccttctccatgcgct

SEQ ID NO: 24754 - DNA, 26 bp, Homo sapiens
tcattcaggtccttctccatgcgctt

SEQ ID NO: 24755 - DNA, 26 bp, Homo sapiens
cattcaggtccttctccatgcgcttc

SEQ ID NO: 24756 - DNA, 26 bp, Homo sapiens
attcaggtccttctccatgcgcttcc

SEQ ID NO: 24757 - DNA, 26 bp, Homo sapiens
ttcaggtccttctccatgcgcttccg

SEQ ID NO: 24758 - DNA, 26 bp, Homo sapiens
tcaggtccttctccatgcgcttccgg

SEQ ID NO: 24759 - DNA, 26 bp, Homo sapiens
caggtccttctccatgcgcttccggt

SEQ ID NO: 24760 - DNA, 26 bp, Homo sapiens
aggtccttctccatgcgcttccggtg

SEQ ID NO: 24761 - DNA, 26 bp, Homo sapiens
ggtccttctccatgcgcttccggtgg

SEQ ID NO: 24762 - DNA, 26 bp, Homo sapiens
gtccttctccatgcgcttccggtgga

SEQ ID NO: 24763 - DNA, 26 bp, Homo sapiens
tccttctccatgcgcttccggtggat

SEQ ID NO: 24764 - DNA, 26 bp, Homo sapiens
ccttctccatgcgcttccggtggatg

SEQ ID NO: 24765 - DNA, 26 bp, Homo sapiens
cttctccatgcgcttccggtggatgt

SEQ ID NO: 24766 - DNA, 26 bp, Homo sapiens
ttctccatgcgcttccggtggatgtc

SEQ ID NO: 24767 - DNA, 26 bp, Homo sapiens
tctccatgcgcttccggtggatgtca

SEQ ID NO: 24768 - DNA, 26 bp, Homo sapiens
ctccatgcgcttccggtggatgtcat

SEQ ID NO: 24769 - DNA, 26 bp, Homo sapiens
tccatgcgcttccggtggatgtcatc

SEQ ID NO: 24770 - DNA, 26 bp, Homo sapiens
ccatgcgcttccggtggatgtcatca

SEQ ID NO: 24771 - DNA, 26 bp, Homo sapiens
catgcgcttccggtggatgtcatcaa

SEQ ID NO: 24772 - DNA, 26 bp, Homo sapiens
atgcgcttccggtggatgtcatcaaa

SEQ ID NO: 24773 - DNA, 26 bp, Homo sapiens
tgcgcttccggtggatgtcatcaaag

SEQ ID NO: 24774 - DNA, 26 bp, Homo sapiens
gcgcttccggtggatgtcatcaaagt

SEQ ID NO: 24775 - DNA, 26 bp, Homo sapiens
cgcttccggtggatgtcatcaaagtc

SEQ ID NO: 24776 - DNA, 26 bp, Homo sapiens
gcttccggtggatgtcatcaaagtcc

SEQ ID NO: 24777 - DNA, 26 bp, Homo sapiens
cttccggtggatgtcatcaaagtcca

SEQ ID NO: 24778 - DNA, 26 bp, Homo sapiens
ttccggtggatgtcatcaaagtccac

SEQ ID NO: 24779 - DNA, 26 bp, Homo sapiens
tccggtggatgtcatcaaagtccact

SEQ ID NO: 24780 - DNA, 26 bp, Homo sapiens
ccggtggatgtcatcaaagtccactc

SEQ ID NO: 24781 - DNA, 26 bp, Homo sapiens
cggtggatgtcatcaaagtccactct

SEQ ID NO: 24782 - DNA, 26 bp, Homo sapiens
ggtggatgtcatcaaagtccactctc

SEQ ID NO: 24783 - DNA, 26 bp, Homo sapiens
gtggatgtcatcaaagtccactctct

SEQ ID NO: 24784 - DNA, 26 bp, Homo sapiens
tggatgtcatcaaagtccactctctc

SEQ ID NO: 24785 - DNA, 26 bp, Homo sapiens
ggatgtcatcaaagtccactctctct

SEQ ID NO: 24786 - DNA, 26 bp, Homo sapiens
gatgtcatcaaagtccactctctctc

SEQ ID NO: 24787 - DNA, 26 bp, Homo sapiens
atgtcatcaaagtccactctctctcc

SEQ ID NO: 24788 - DNA, 26 bp, Homo sapiens
tgtcatcaaagtccactctctctcca

SEQ ID NO: 24789 - DNA, 26 bp, Homo sapiens
gtcatcaaagtccactctctctccat

SEQ ID NO: 24790 - DNA, 26 bp, Homo sapiens
tcatcaaagtccactctctctccatc

SEQ ID NO: 24791 - DNA, 26 bp, Homo sapiens
catcaaagtccactctctctccatcg

SEQ ID NO: 24792 - DNA, 26 bp, Homo sapiens
atcaaagtccactctctctccatcgg

SEQ ID NO: 24793 - DNA, 26 bp, Homo sapiens
tcaaagtccactctctctccatcggg

SEQ ID NO: 24794 - DNA, 26 bp, Homo sapiens
caaagtccactctctctccatcgggg

SEQ ID NO: 24795 - DNA, 26 bp, Homo sapiens
aaagtccactctctctccatcgggga

SEQ ID NO: 24796 - DNA, 26 bp, Homo sapiens
aagtccactctctctccatcggggat

SEQ ID NO: 24797 - DNA, 26 bp, Homo sapiens
agtccactctctctccatcggggatc

SEQ ID NO: 24798 - DNA, 26 bp, Homo sapiens
gtccactctctctccatcggggatct

SEQ ID NO: 24799 - DNA, 26 bp, Homo sapiens
tccactctctctccatcggggatctt

SEQ ID NO: 24800 - DNA, 26 bp, Homo sapiens
ccactctctctccatcggggatcttg

SEQ ID NO: 24801 - DNA, 26 bp, Homo sapiens
cactctctctccatcggggatcttgg

SEQ ID NO: 24802 - DNA, 26 bp, Homo sapiens
actctctctccatcggggatcttggg

SEQ ID NO: 24803 - DNA, 26 bp, Homo sapiens
ctctctctccatcggggatcttggga

SEQ ID NO: 24804 - DNA, 26 bp, Homo sapiens
tctctctccatcggggatcttgggag

SEQ ID NO: 24805 - DNA, 26 bp, Homo sapiens
ctctctccatcggggatcttgggagg

SEQ ID NO: 24806 - DNA, 26 bp, Homo sapiens
tctctccatcggggatcttgggaggc

SEQ ID NO: 24807 - DNA, 26 bp, Homo sapiens
ctctccatcggggatcttgggaggca

SEQ ID NO: 24808 - DNA, 26 bp, Homo sapiens
tctccatcggggatcttgggaggcac

SEQ ID NO: 24809 - DNA, 26 bp, Homo sapiens
ctccatcggggatcttgggaggcacc

SEQ ID NO: 24810 - DNA, 26 bp, Homo sapiens
tccatcggggatcttgggaggcacca

SEQ ID NO: 24811 - DNA, 26 bp, Homo sapiens
ccatcggggatcttgggaggcaccaa

SEQ ID NO: 24812 - DNA, 26 bp, Homo sapiens
catcggggatcttgggaggcaccaag

SEQ ID NO: 24813 - DNA, 26 bp, Homo sapiens
atcggggatcttgggaggcaccaagt

SEQ ID NO: 24814 - DNA, 26 bp, Homo sapiens
tcggggatcttgggaggcaccaagtt

SEQ ID NO: 24815 - DNA, 26 bp, Homo sapiens
cggggatcttgggaggcaccaagttg

SEQ ID NO: 24816 - DNA, 26 bp, Homo sapiens
ggggatcttgggaggcaccaagttgg

SEQ ID NO: 24817 - DNA, 26 bp, Homo sapiens
gggatcttgggaggcaccaagttggg

SEQ ID NO: 24818 - DNA, 26 bp, Homo sapiens
ggatcttgggaggcaccaagttgggc

SEQ ID NO: 24819 - DNA, 26 bp, Homo sapiens
gatcttgggaggcaccaagttgggca

SEQ ID NO: 24820 - DNA, 26 bp, Homo sapiens
atcttgggaggcaccaagttgggcat

SEQ ID NO: 24821 - DNA, 26 bp, Homo sapiens
tcttgggaggcaccaagttgggcatg

SEQ ID NO: 24822 - DNA, 26 bp, Homo sapiens
cttgggaggcaccaagttgggcatga

SEQ ID NO: 24823 - DNA, 26 bp, Homo sapiens
ttgggaggcaccaagttgggcatgaa

SEQ ID NO: 24824 - DNA, 26 bp, Homo sapiens
tgggaggcaccaagttgggcatgaac

SEQ ID NO: 24825 - DNA, 26 bp, Homo sapiens
gggaggcaccaagttgggcatgaacg

SEQ ID NO: 24826 - DNA, 26 bp, Homo sapiens
ggaggcaccaagttgggcatgaacga

SEQ ID NO: 24827 - DNA, 26 bp, Homo sapiens
gaggcaccaagttgggcatgaacgac

SEQ ID NO: 24828 - DNA, 26 bp, Homo sapiens
aggcaccaagttgggcatgaacgacc

SEQ ID NO: 24829 - DNA, 26 bp, Homo sapiens
ggcaccaagttgggcatgaacgacct

SEQ ID NO: 24830 - DNA, 26 bp, Homo sapiens
gcaccaagttgggcatgaacgacctg

SEQ ID NO: 24831 - DNA, 26 bp, Homo sapiens
caccaagttgggcatgaacgacctgg

SEQ ID NO: 24832 - DNA, 26 bp, Homo sapiens
accaagttgggcatgaacgacctggg

SEQ ID NO: 24833 - DNA, 26 bp, Homo sapiens
ccaagttgggcatgaacgacctgggc

SEQ ID NO: 24834 - DNA, 26 bp, Homo sapiens
caagttgggcatgaacgacctgggct

SEQ ID NO: 24835 - DNA, 26 bp, Homo sapiens
aagttgggcatgaacgacctgggctt

SEQ ID NO: 24836 - DNA, 26 bp, Homo sapiens
agttgggcatgaacgacctgggcttt

SEQ ID NO: 24837 - DNA, 26 bp, Homo sapiens
gttgggcatgaacgacctgggctttg

SEQ ID NO: 24838 - DNA, 26 bp, Homo sapiens
ttgggcatgaacgacctgggctttgg

SEQ ID NO: 24839 - DNA, 26 bp, Homo sapiens
tgggcatgaacgacctgggctttggt

SEQ ID NO: 24840 - DNA, 26 bp, Homo sapiens
gggcatgaacgacctgggctttggtt

SEQ ID NO: 24841 - DNA, 26 bp, Homo sapiens
ggcatgaacgacctgggctttggttt

SEQ ID NO: 24842 - DNA, 26 bp, Homo sapiens
gcatgaacgacctgggctttggtttg

SEQ ID NO: 24843 - DNA, 26 bp, Homo sapiens
catgaacgacctgggctttggtttgg

SEQ ID NO: 24844 - DNA, 26 bp, Homo sapiens
atgaacgacctgggctttggtttgga

SEQ ID NO: 24845 - DNA, 26 bp, Homo sapiens
tgaacgacctgggctttggtttggac

SEQ ID NO: 24846 - DNA, 26 bp, Homo sapiens
gaacgacctgggctttggtttggact

SEQ ID NO: 24847 - DNA, 26 bp, Homo sapiens
aacgacctgggctttggtttggactc

SEQ ID NO: 24848 - DNA, 26 bp, Homo sapiens
acgacctgggctttggtttggactcc

SEQ ID NO: 24849 - DNA, 26 bp, Homo sapiens
cgacctgggctttggtttggactcct

SEQ ID NO: 24850 - DNA, 26 bp, Homo sapiens
gacctgggctttggtttggactcctc

SEQ ID NO: 24851 - DNA, 26 bp, Homo sapiens
acctgggctttggtttggactcctcc

SEQ ID NO: 24852 - DNA, 26 bp, Homo sapiens
cctgggctttggtttggactcctcca

SEQ ID NO: 24853 - DNA, 26 bp, Homo sapiens
ctgggctttggtttggactcctccat

SEQ ID NO: 24854 - DNA, 26 bp, Homo sapiens
tgggctttggtttggactcctccatt

SEQ ID NO: 24855 - DNA, 26 bp, Homo sapiens
gggctttggtttggactcctccattg

SEQ ID NO: 24856 - DNA, 26 bp, Homo sapiens
ggctttggtttggactcctccattgg

SEQ ID NO: 24857 - DNA, 26 bp, Homo sapiens
gctttggtttggactcctccattggg

SEQ ID NO: 24858 - DNA, 26 bp, Homo sapiens
ctttggtttggactcctccattgggc

SEQ ID NO: 24859 - DNA, 26 bp, Homo sapiens
tttggtttggactcctccattgggcc

SEQ ID NO: 24860 - DNA, 26 bp, Homo sapiens
ttggtttggactcctccattgggcca

SEQ ID NO: 24861 - DNA, 26 bp, Homo sapiens
tggtttggactcctccattgggccat

SEQ ID NO: 24862 - DNA, 26 bp, Homo sapiens
ggtttggactcctccattgggccatc

SEQ ID NO: 24863 - DNA, 26 bp, Homo sapiens
gtttggactcctccattgggccatct

SEQ ID NO: 24864 - DNA, 26 bp, Homo sapiens
tttggactcctccattgggccatctt

SEQ ID NO: 24865 - DNA, 26 bp, Homo sapiens
ttggactcctccattgggccatcttc

SEQ ID NO: 24866 - DNA, 26 bp, Homo sapiens
tggactcctccattgggccatcttca

SEQ ID NO: 24867 - DNA, 26 bp, Homo sapiens
ggactcctccattgggccatcttcag

SEQ ID NO: 24868 - DNA, 26 bp, Homo sapiens
gactcctccattgggccatcttcagc

SEQ ID NO: 24869 - DNA, 26 bp, Homo sapiens
actcctccattgggccatcttcagcc

SEQ ID NO: 24870 - DNA, 26 bp, Homo sapiens
ctcctccattgggccatcttcagcct

SEQ ID NO: 24871 - DNA, 26 bp, Homo sapiens
tcctccattgggccatcttcagcctc

SEQ ID NO: 24872 - DNA, 26 bp, Homo sapiens
cctccattgggccatcttcagcctcc

SEQ ID NO: 24873 - DNA, 26 bp, Homo sapiens
ctccattgggccatcttcagcctcct

SEQ ID NO: 24874 - DNA, 26 bp, Homo sapiens
tccattgggccatcttcagcctcctt

SEQ ID NO: 24875 - DNA, 26 bp, Homo sapiens
ccattgggccatcttcagcctccttt

SEQ ID NO: 24876 - DNA, 26 bp, Homo sapiens
cattgggccatcttcagcctcctttg

SEQ ID NO: 24877 - DNA, 26 bp, Homo sapiens
attgggccatcttcagcctcctttgc

SEQ ID NO: 24878 - DNA, 26 bp, Homo sapiens
ttgggccatcttcagcctcctttgct

SEQ ID NO: 24879 - DNA, 26 bp, Homo sapiens
tgggccatcttcagcctcctttgctt

SEQ ID NO: 24880 - DNA, 26 bp, Homo sapiens
gggccatcttcagcctcctttgcttc

SEQ ID NO: 24881 - DNA, 26 bp, Homo sapiens
ggccatcttcagcctcctttgcttcc

SEQ ID NO: 24882 - DNA, 26 bp, Homo sapiens
gccatcttcagcctcctttgcttcct

SEQ ID NO: 24883 - DNA, 26 bp, Homo sapiens
ccatcttcagcctcctttgcttcctc

SEQ ID NO: 24884 - DNA, 26 bp, Homo sapiens
catcttcagcctcctttgcttcctct

SEQ ID NO: 24885 - DNA, 26 bp, Homo sapiens
atcttcagcctcctttgcttcctctt

SEQ ID NO: 24886 - DNA, 26 bp, Homo sapiens
tcttcagcctcctttgcttcctcttc

SEQ ID NO: 24887 - DNA, 26 bp, Homo sapiens
cttcagcctcctttgcttcctcttct

SEQ ID NO: 24888 - DNA, 26 bp, Homo sapiens
ttcagcctcctttgcttcctcttctt

SEQ ID NO: 24889 - DNA, 26 bp, Homo sapiens
tcagcctcctttgcttcctcttcttc

SEQ ID NO: 24890 - DNA, 26 bp, Homo sapiens
cagcctcctttgcttcctcttcttct

SEQ ID NO: 24891 - DNA, 26 bp, Homo sapiens
agcctcctttgcttcctcttcttctt

SEQ ID NO: 24892 - DNA, 26 bp, Homo sapiens
gcctcctttgcttcctcttcttcttc

SEQ ID NO: 24893 - DNA, 26 bp, Homo sapiens
cctcctttgcttcctcttcttcttca

SEQ ID NO: 24894 - DNA, 26 bp, Homo sapiens
ctcctttgcttcctcttcttcttcat

SEQ ID NO: 24895 - DNA, 26 bp, Homo sapiens
tcctttgcttcctcttcttcttcatc

SEQ ID NO: 24896 - DNA, 26 bp, Homo sapiens
cctttgcttcctcttcttcttcatct

SEQ ID NO: 24897 - DNA, 26 bp, Homo sapiens
ctttgcttcctcttcttcttcatctt

SEQ ID NO: 24898 - DNA, 26 bp, Homo sapiens
tttgcttcctcttcttcttcatcttc

SEQ ID NO: 24899 - DNA, 26 bp, Homo sapiens
ttgcttcctcttcttcttcatcttct

SEQ ID NO: 24900 - DNA, 26 bp, Homo sapiens
tgcttcctcttcttcttcatcttctt

SEQ ID NO: 24901 - DNA, 26 bp, Homo sapiens
gcttcctcttcttcttcatcttcttc

SEQ ID NO: 24902 - DNA, 26 bp, Homo sapiens
cttcctcttcttcttcatcttcttct

SEQ ID NO: 24903 - DNA, 26 bp, Homo sapiens
ttcctcttcttcttcatcttcttctg

SEQ ID NO: 24904 - DNA, 26 bp, Homo sapiens
tcctcttcttcttcatcttcttctgc

SEQ ID NO: 24905 - DNA, 26 bp, Homo sapiens
cctcttcttcttcatcttcttctgcc

SEQ ID NO: 24906 - DNA, 26 bp, Homo sapiens
ctcttcttcttcatcttcttctgccc

SEQ ID NO: 24907 - DNA, 26 bp, Homo sapiens
tcttcttcttcatcttcttctgccct

SEQ ID NO: 24908 - DNA, 26 bp, Homo sapiens
cttcttcttcatcttcttctgccctg

SEQ ID NO: 24909 - DNA, 26 bp, Homo sapiens
ttcttcttcatcttcttctgccctgg

SEQ ID NO: 24910 - DNA, 26 bp, Homo sapiens
tcttcttcatcttcttctgccctggt

SEQ ID NO: 24911 - DNA, 26 bp, Homo sapiens
cttcttcatcttcttctgccctggtc

SEQ ID NO: 24912 - DNA, 26 bp, Homo sapiens
ttcttcatcttcttctgccctggtct

SEQ ID NO: 24913 - DNA, 26 bp, Homo sapiens
tcttcatcttcttctgccctggtctc

SEQ ID NO: 24914 - DNA, 26 bp, Homo sapiens
cttcatcttcttctgccctggtctcc

SEQ ID NO: 24915 - DNA, 26 bp, Homo sapiens
ttcatcttcttctgccctggtctcct

SEQ ID NO: 24916 - DNA, 26 bp, Homo sapiens
tcatcttcttctgccctggtctcctc

SEQ ID NO: 24917 - DNA, 26 bp, Homo sapiens
catcttcttctgccctggtctcctcg

SEQ ID NO: 24918 - DNA, 26 bp, Homo sapiens
atcttcttctgccctggtctcctcgg

SEQ ID NO: 24919 - DNA, 26 bp, Homo sapiens
tcttcttctgccctggtctcctcggt

SEQ ID NO: 24920 - DNA, 26 bp, Homo sapiens
cttcttctgccctggtctcctcggtc

SEQ ID NO: 24921 - DNA, 26 bp, Homo sapiens
ttcttctgccctggtctcctcggtct

SEQ ID NO: 24922 - DNA, 26 bp, Homo sapiens
tcttctgccctggtctcctcggtctc

SEQ ID NO: 24923 - DNA, 26 bp, Homo sapiens
cttctgccctggtctcctcggtctca

SEQ ID NO: 24924 - DNA, 26 bp, Homo sapiens
ttctgccctggtctcctcggtctcag

SEQ ID NO: 24925 - DNA, 26 bp, Homo sapiens
tctgccctggtctcctcggtctcagc

SEQ ID NO: 24926 - DNA, 26 bp, Homo sapiens
ctgccctggtctcctcggtctcagcc

SEQ ID NO: 24927 - DNA, 26 bp, Homo sapiens
tgccctggtctcctcggtctcagcct

SEQ ID NO: 24928 - DNA, 26 bp, Homo sapiens
gccctggtctcctcggtctcagcctc

SEQ ID NO: 24929 - DNA, 26 bp, Homo sapiens
ccctggtctcctcggtctcagcctct

SEQ ID NO: 24930 - DNA, 26 bp, Homo sapiens
cctggtctcctcggtctcagcctctg

SEQ ID NO: 24931 - DNA, 26 bp, Homo sapiens
ctggtctcctcggtctcagcctctgc

SEQ ID NO: 24932 - DNA, 26 bp, Homo sapiens
tggtctcctcggtctcagcctctgct

SEQ ID NO: 24933 - DNA, 26 bp, Homo sapiens
ggtctcctcggtctcagcctctgctt

SEQ ID NO: 24934 - DNA, 26 bp, Homo sapiens
gtctcctcggtctcagcctctgcttc

SEQ ID NO: 24935 - DNA, 26 bp, Homo sapiens
tctcctcggtctcagcctctgcttca

SEQ ID NO: 24936 - DNA, 26 bp, Homo sapiens
ctcctcggtctcagcctctgcttcag

SEQ ID NO: 24937 - DNA, 26 bp, Homo sapiens
tcctcggtctcagcctctgcttcagc

SEQ ID NO: 24938 - DNA, 26 bp, Homo sapiens
cctcggtctcagcctctgcttcagca

SEQ ID NO: 24939 - DNA, 26 bp, Homo sapiens
ctcggtctcagcctctgcttcagcat

SEQ ID NO: 24940 - DNA, 26 bp, Homo sapiens
tcggtctcagcctctgcttcagcatc

SEQ ID NO: 24941 - DNA, 26 bp, Homo sapiens
cggtctcagcctctgcttcagcatcc

SEQ ID NO: 24942 - DNA, 26 bp, Homo sapiens
ggtctcagcctctgcttcagcatcct

SEQ ID NO: 24943 - DNA, 26 bp, Homo sapiens
gtctcagcctctgcttcagcatcctc

SEQ ID NO: 24944 - DNA, 26 bp, Homo sapiens
tctcagcctctgcttcagcatcctct

SEQ ID NO: 24945 - DNA, 26 bp, Homo sapiens
ctcagcctctgcttcagcatcctctt

SEQ ID NO: 24946 - DNA, 26 bp, Homo sapiens
tcagcctctgcttcagcatcctcttc

SEQ ID NO: 24947 - DNA, 26 bp, Homo sapiens
cagcctctgcttcagcatcctcttcc

SEQ ID NO: 24948 - DNA, 26 bp, Homo sapiens
agcctctgcttcagcatcctcttccg

SEQ ID NO: 24949 - DNA, 26 bp, Homo sapiens
gcctctgcttcagcatcctcttccgc

SEQ ID NO: 24950 - DNA, 26 bp, Homo sapiens
cctctgcttcagcatcctcttccgct

SEQ ID NO: 24951 - DNA, 26 bp, Homo sapiens
ctctgcttcagcatcctcttccgctg

SEQ ID NO: 24952 - DNA, 26 bp, Homo sapiens
tctgcttcagcatcctcttccgctgc

SEQ ID NO: 24953 - DNA, 26 bp, Homo sapiens
ctgcttcagcatcctcttccgctgcc

SEQ ID NO: 24954 - DNA, 26 bp, Homo sapiens
tgcttcagcatcctcttccgctgcct

SEQ ID NO: 24955 - DNA, 26 bp, Homo sapiens
gcttcagcatcctcttccgctgcctc

SEQ ID NO: 24956 - DNA, 26 bp, Homo sapiens
cttcagcatcctcttccgctgcctcc

SEQ ID NO: 24957 - DNA, 26 bp, Homo sapiens
ttcagcatcctcttccgctgcctcct

SEQ ID NO: 24958 - DNA, 26 bp, Homo sapiens
tcagcatcctcttccgctgcctcctc

SEQ ID NO: 24959 - DNA, 26 bp, Homo sapiens
cagcatcctcttccgctgcctcctcc

SEQ ID NO: 24960 - DNA, 26 bp, Homo sapiens
agcatcctcttccgctgcctcctcct

SEQ ID NO: 24961 - DNA, 26 bp, Homo sapiens
gcatcctcttccgctgcctcctcctg

SEQ ID NO: 24962 - DNA, 26 bp, Homo sapiens
catcctcttccgctgcctcctcctgc

SEQ ID NO: 24963 - DNA, 26 bp, Homo sapiens
atcctcttccgctgcctcctcctgct

SEQ ID NO: 24964 - DNA, 26 bp, Homo sapiens
tcctcttccgctgcctcctcctgctc

SEQ ID NO: 24965 - DNA, 26 bp, Homo sapiens
cctcttccgctgcctcctcctgctcg

SEQ ID NO: 24966 - DNA, 26 bp, Homo sapiens
ctcttccgctgcctcctcctgctcgt

SEQ ID NO: 24967 - DNA, 26 bp, Homo sapiens
tcttccgctgcctcctcctgctcgtc

SEQ ID NO: 24968 - DNA, 26 bp, Homo sapiens
cttccgctgcctcctcctgctcgtct

SEQ ID NO: 24969 - DNA, 26 bp, Homo sapiens
ttccgctgcctcctcctgctcgtctt

SEQ ID NO: 24970 - DNA, 26 bp, Homo sapiens
tccgctgcctcctcctgctcgtcttc

SEQ ID NO: 24971 - DNA, 26 bp, Homo sapiens
ccgctgcctcctcctgctcgtcttcg

SEQ ID NO: 24972 - DNA, 26 bp, Homo sapiens
cgctgcctcctcctgctcgtcttcgt

SEQ ID NO: 24973 - DNA, 26 bp, Homo sapiens
gctgcctcctcctgctcgtcttcgtc

SEQ ID NO: 24974 - DNA, 26 bp, Homo sapiens
ctgcctcctcctgctcgtcttcgtcc

SEQ ID NO: 24975 - DNA, 26 bp, Homo sapiens
tgcctcctcctgctcgtcttcgtcct

SEQ ID NO: 24976 - DNA, 26 bp, Homo sapiens
gcctcctcctgctcgtcttcgtcctc

SEQ ID NO: 24977 - DNA, 26 bp, Homo sapiens
cctcctcctgctcgtcttcgtcctct

SEQ ID NO: 24978 - DNA, 26 bp, Homo sapiens
ctcctcctgctcgtcttcgtcctctc

SEQ ID NO: 24979 - DNA, 26 bp, Homo sapiens
tcctcctgctcgtcttcgtcctctct

SEQ ID NO: 24980 - DNA, 26 bp, Homo sapiens
cctcctgctcgtcttcgtcctctctc

SEQ ID NO: 24981 - DNA, 26 bp, Homo sapiens
ctcctgctcgtcttcgtcctctctcc

SEQ ID NO: 24982 - DNA, 26 bp, Homo sapiens
tcctgctcgtcttcgtcctctctcca

SEQ ID NO: 24983 - DNA, 26 bp, Homo sapiens
cctgctcgtcttcgtcctctctccag

SEQ ID NO: 24984 - DNA, 26 bp, Homo sapiens
ctgctcgtcttcgtcctctctccagt

SEQ ID NO: 24985 - DNA, 26 bp, Homo sapiens
tgctcgtcttcgtcctctctccagtc

SEQ ID NO: 24986 - DNA, 26 bp, Homo sapiens
gctcgtcttcgtcctctctccagtcc

SEQ ID NO: 24987 - DNA, 26 bp, Homo sapiens
ctcgtcttcgtcctctctccagtcct

SEQ ID NO: 24988 - DNA, 26 bp, Homo sapiens
tcgtcttcgtcctctctccagtcctc

SEQ ID NO: 24989 - DNA, 26 bp, Homo sapiens
cgtcttcgtcctctctccagtcctcc

SEQ ID NO: 24990 - DNA, 26 bp, Homo sapiens
gtcttcgtcctctctccagtcctcct

SEQ ID NO: 24991 - DNA, 26 bp, Homo sapiens
tcttcgtcctctctccagtcctcctc

SEQ ID NO: 24992 - DNA, 26 bp, Homo sapiens
cttcgtcctctctccagtcctcctct

SEQ ID NO: 24993 - DNA, 26 bp, Homo sapiens
ttcgtcctctctccagtcctcctctt

SEQ ID NO: 24994 - DNA, 26 bp, Homo sapiens
tcgtcctctctccagtcctcctcttc

SEQ ID NO: 24995 - DNA, 26 bp, Homo sapiens
cgtcctctctccagtcctcctcttct

SEQ ID NO: 24996 - DNA, 26 bp, Homo sapiens
gtcctctctccagtcctcctcttctt

SEQ ID NO: 24997 - DNA, 26 bp, Homo sapiens
tcctctctccagtcctcctcttcttc

SEQ ID NO: 24998 - DNA, 26 bp, Homo sapiens
cctctctccagtcctcctcttcttca

SEQ ID NO: 24999 - DNA, 26 bp, Homo sapiens
ctctctccagtcctcctcttcttcaa

SEQ ID NO: 25000 - DNA, 26 bp, Homo sapiens
tctctccagtcctcctcttcttcaac

SEQ ID NO: 25001 - DNA, 26 bp, Homo sapiens
ctctccagtcctcctcttcttcaaca

SEQ ID NO: 25002 - DNA, 26 bp, Homo sapiens
tctccagtcctcctcttcttcaacag

SEQ ID NO: 25003 - DNA, 26 bp, Homo sapiens
ctccagtcctcctcttcttcaacagc

SEQ ID NO: 25004 - DNA, 26 bp, Homo sapiens
tccagtcctcctcttcttcaacagct

SEQ ID NO: 25005 - DNA, 26 bp, Homo sapiens
ccagtcctcctcttcttcaacagctg

SEQ ID NO: 25006 - DNA, 26 bp, Homo sapiens
cagtcctcctcttcttcaacagctgc

SEQ ID NO: 25007 - DNA, 26 bp, Homo sapiens
agtcctcctcttcttcaacagctgct

SEQ ID NO: 25008 - DNA, 26 bp, Homo sapiens
gtcctcctcttcttcaacagctgctt

SEQ ID NO: 25009 - DNA, 26 bp, Homo sapiens
tcctcctcttcttcaacagctgcttc

SEQ ID NO: 25010 - DNA, 26 bp, Homo sapiens
cctcctcttcttcaacagctgcttct

SEQ ID NO: 25011 - DNA, 26 bp, Homo sapiens
ctcctcttcttcaacagctgcttctt

SEQ ID NO: 25012 - DNA, 26 bp, Homo sapiens
tcctcttcttcaacagctgcttcttc

SEQ ID NO: 25013 - DNA, 26 bp, Homo sapiens
cctcttcttcaacagctgcttcttcc

SEQ ID NO: 25014 - DNA, 26 bp, Homo sapiens
ctcttcttcaacagctgcttcttcct

SEQ ID NO: 25015 - DNA, 26 bp, Homo sapiens
tcttcttcaacagctgcttcttcctg

SEQ ID NO: 25016 - DNA, 26 bp, Homo sapiens
cttcttcaacagctgcttcttcctgc

SEQ ID NO: 25017 - DNA, 26 bp, Homo sapiens
ttcttcaacagctgcttcttcctgct

SEQ ID NO: 25018 - DNA, 26 bp, Homo sapiens
tcttcaacagctgcttcttcctgctc

SEQ ID NO: 25019 - DNA, 26 bp, Homo sapiens
cttcaacagctgcttcttcctgctcc

SEQ ID NO: 25020 - DNA, 26 bp, Homo sapiens
ttcaacagctgcttcttcctgctcct

SEQ ID NO: 25021 - DNA, 26 bp, Homo sapiens
tcaacagctgcttcttcctgctcctc

SEQ ID NO: 25022 - DNA, 26 bp, Homo sapiens
caacagctgcttcttcctgctcctcc

SEQ ID NO: 25023 - DNA, 26 bp, Homo sapiens
aacagctgcttcttcctgctcctcct

SEQ ID NO: 25024 - DNA, 26 bp, Homo sapiens
acagctgcttcttcctgctcctcctc

SEQ ID NO: 25025 - DNA, 26 bp, Homo sapiens
cagctgcttcttcctgctcctcctcc

SEQ ID NO: 25026 - DNA, 26 bp, Homo sapiens
agctgcttcttcctgctcctcctcct

SEQ ID NO: 25027 - DNA, 26 bp, Homo sapiens
gctgcttcttcctgctcctcctcctc

SEQ ID NO: 25028 - DNA, 26 bp, Homo sapiens
ctgcttcttcctgctcctcctcctcg

SEQ ID NO: 25029 - DNA, 26 bp, Homo sapiens
tgcttcttcctgctcctcctcctcgt

SEQ ID NO: 25030 - DNA, 26 bp, Homo sapiens
gcttcttcctgctcctcctcctcgta

SEQ ID NO: 25031 - DNA, 26 bp, Homo sapiens
cttcttcctgctcctcctcctcgtac

SEQ ID NO: 25032 - DNA, 26 bp, Homo sapiens
ttcttcctgctcctcctcctcgtact

SEQ ID NO: 25033 - DNA, 26 bp, Homo sapiens
tcttcctgctcctcctcctcgtactc

SEQ ID NO: 25034 - DNA, 26 bp, Homo sapiens
cttcctgctcctcctcctcgtactct

SEQ ID NO: 25035 - DNA, 26 bp, Homo sapiens
ttcctgctcctcctcctcgtactctt

SEQ ID NO: 25036 - DNA, 26 bp, Homo sapiens
tcctgctcctcctcctcgtactcttc

SEQ ID NO: 25037 - DNA, 26 bp, Homo sapiens
cctgctcctcctcctcgtactcttcc

SEQ ID NO: 25038 - DNA, 26 bp, Homo sapiens
ctgctcctcctcctcgtactcttcca

SEQ ID NO: 25039 - DNA, 26 bp, Homo sapiens
tgctcctcctcctcgtactcttccac

SEQ ID NO: 25040 - DNA, 26 bp, Homo sapiens
gctcctcctcctcgtactcttccacc

SEQ ID NO: 25041 - DNA, 26 bp, Homo sapiens
ctcctcctcctcgtactcttccacca

SEQ ID NO: 25042 - DNA, 26 bp, Homo sapiens
tcctcctcctcgtactcttccaccac

SEQ ID NO: 25043 - DNA, 26 bp, Homo sapiens
cctcctcctcgtactcttccaccacc

SEQ ID NO: 25044 - DNA, 26 bp, Homo sapiens
ctcctcctcgtactcttccaccacct

SEQ ID NO: 25045 - DNA, 26 bp, Homo sapiens
tcctcctcgtactcttccaccacctc

SEQ ID NO: 25046 - DNA, 26 bp, Homo sapiens
cctcctcgtactcttccaccacctct

SEQ ID NO: 25047 - DNA, 26 bp, Homo sapiens
ctcctcgtactcttccaccacctctt

SEQ ID NO: 25048 - DNA, 26 bp, Homo sapiens
tcctcgtactcttccaccacctcttc

SEQ ID NO: 25049 - DNA, 26 bp, Homo sapiens
cctcgtactcttccaccacctcttct

SEQ ID NO: 25050 - DNA, 26 bp, Homo sapiens
ctcgtactcttccaccacctcttcta

SEQ ID NO: 25051 - DNA, 26 bp, Homo sapiens
tcgtactcttccaccacctcttctat

SEQ ID NO: 25052 - DNA, 26 bp, Homo sapiens
cgtactcttccaccacctcttctatg

SEQ ID NO: 25053 - DNA, 26 bp, Homo sapiens
gtactcttccaccacctcttctatgt

SEQ ID NO: 25054 - DNA, 26 bp, Homo sapiens
tactcttccaccacctcttctatgtc

SEQ ID NO: 25055 - DNA, 26 bp, Homo sapiens
actcttccaccacctcttctatgtca

SEQ ID NO: 25056 - DNA, 26 bp, Homo sapiens
ctcttccaccacctcttctatgtcag

SEQ ID NO: 25057 - DNA, 26 bp, Homo sapiens
tcttccaccacctcttctatgtcaga

SEQ ID NO: 25058 - DNA, 26 bp, Homo sapiens
cttccaccacctcttctatgtcagac

SEQ ID NO: 25059 - DNA, 26 bp, Homo sapiens
ttccaccacctcttctatgtcagaca

SEQ ID NO: 25060 - DNA, 26 bp, Homo sapiens
tccaccacctcttctatgtcagacat

SEQ ID NO: 25061 - DNA, 26 bp, Homo sapiens
ccaccacctcttctatgtcagacatg

SEQ ID NO: 25062 - DNA, 26 bp, Homo sapiens
caccacctcttctatgtcagacatgg

SEQ ID NO: 25063 - DNA, 26 bp, Homo sapiens
accacctcttctatgtcagacatggt

SEQ ID NO: 25064 - DNA, 26 bp, Homo sapiens
ccacctcttctatgtcagacatggtc

SEQ ID NO: 25065 - DNA, 26 bp, Homo sapiens
cacctcttctatgtcagacatggtct

SEQ ID NO: 25066 - DNA, 26 bp, Homo sapiens
acctcttctatgtcagacatggtctc

SEQ ID NO: 25067 - DNA, 26 bp, Homo sapiens
cctcttctatgtcagacatggtctct

SEQ ID NO: 25068 - DNA, 26 bp, Homo sapiens
ctcttctatgtcagacatggtctctg

SEQ ID NO: 25069 - DNA, 26 bp, Homo sapiens
tcttctatgtcagacatggtctctgc

SEQ ID NO: 25070 - DNA, 26 bp, Homo sapiens
cttctatgtcagacatggtctctgct

SEQ ID NO: 25071 - DNA, 26 bp, Homo sapiens
ttctatgtcagacatggtctctgctc

SEQ ID NO: 25072 - DNA, 26 bp, Homo sapiens
tctatgtcagacatggtctctgctct

SEQ ID NO: 25073 - DNA, 26 bp, Homo sapiens
ctatgtcagacatggtctctgctctc

SEQ ID NO: 25074 - DNA, 26 bp, Homo sapiens
tatgtcagacatggtctctgctctcc

SEQ ID NO: 25075 - DNA, 26 bp, Homo sapiens
atgtcagacatggtctctgctctccc

SEQ ID NO: 25076 - DNA, 26 bp, Homo sapiens
tgtcagacatggtctctgctctccct

SEQ ID NO: 25077 - DNA, 26 bp, Homo sapiens
gtcagacatggtctctgctctccctc

SEQ ID NO: 25078 - DNA, 26 bp, Homo sapiens
tcagacatggtctctgctctccctcc

SEQ ID NO: 25079 - DNA, 26 bp, Homo sapiens
cagacatggtctctgctctccctcca

SEQ ID NO: 25080 - DNA, 26 bp, Homo sapiens
agacatggtctctgctctccctccaa

SEQ ID NO: 25081 - DNA, 26 bp, Homo sapiens
gacatggtctctgctctccctccaaa

SEQ ID NO: 25082 - DNA, 26 bp, Homo sapiens
acatggtctctgctctccctccaaaa

SEQ ID NO: 25083 - DNA, 26 bp, Homo sapiens
catggtctctgctctccctccaaaag

SEQ ID NO: 25084 - DNA, 26 bp, Homo sapiens
atggtctctgctctccctccaaaagg

SEQ ID NO: 25085 - DNA, 26 bp, Homo sapiens
tggtctctgctctccctccaaaagga

SEQ ID NO: 25086 - DNA, 26 bp, Homo sapiens
ggtctctgctctccctccaaaaggag

SEQ ID NO: 25087 - DNA, 26 bp, Homo sapiens
gtctctgctctccctccaaaaggaga

SEQ ID NO: 25088 - DNA, 26 bp, Homo sapiens
tctctgctctccctccaaaaggagaa

SEQ ID NO: 25089 - DNA, 26 bp, Homo sapiens
ctctgctctccctccaaaaggagaaa

SEQ ID NO: 25090 - DNA, 26 bp, Homo sapiens
tctgctctccctccaaaaggagaaaa

SEQ ID NO: 25091 - DNA, 26 bp, Homo sapiens
ctgctctccctccaaaaggagaaaaa

SEQ ID NO: 25092 - DNA, 26 bp, Homo sapiens
tgctctccctccaaaaggagaaaaaa

SEQ ID NO: 25093 - DNA, 26 bp, Homo sapiens
gctctccctccaaaaggagaaaaaag

SEQ ID NO: 25094 - DNA, 26 bp, Homo sapiens
ctctccctccaaaaggagaaaaaagt

SEQ ID NO: 25095 - DNA, 26 bp, Homo sapiens
tctccctccaaaaggagaaaaaagtc

SEQ ID NO: 25096 - DNA, 26 bp, Homo sapiens
ctccctccaaaaggagaaaaaagtca

SEQ ID NO: 25097 - DNA, 26 bp, Homo sapiens
tccctccaaaaggagaaaaaagtcag

SEQ ID NO: 25098 - DNA, 26 bp, Homo sapiens
ccctccaaaaggagaaaaaagtcagt

SEQ ID NO: 25099 - DNA, 26 bp, Homo sapiens
cctccaaaaggagaaaaaagtcagtg

SEQ ID NO: 25100 - DNA, 26 bp, Homo sapiens
ctccaaaaggagaaaaaagtcagtgc

SEQ ID NO: 25101 - DNA, 26 bp, Homo sapiens
tccaaaaggagaaaaaagtcagtgca

SEQ ID NO: 25102 - DNA, 26 bp, Homo sapiens
ccaaaaggagaaaaaagtcagtgcag

SEQ ID NO: 25103 - DNA, 26 bp, Homo sapiens
caaaaggagaaaaaagtcagtgcagg

SEQ ID NO: 25104 - DNA, 26 bp, Homo sapiens
aaaaggagaaaaaagtcagtgcaggt

SEQ ID NO: 25105 - DNA, 26 bp, Homo sapiens
aaaggagaaaaaagtcagtgcaggta

SEQ ID NO: 25106 - DNA, 26 bp, Homo sapiens
aaggagaaaaaagtcagtgcaggtac

SEQ ID NO: 25107 - DNA, 26 bp, Homo sapiens
aggagaaaaaagtcagtgcaggtaca

SEQ ID NO: 25108 - DNA, 26 bp, Homo sapiens
ggagaaaaaagtcagtgcaggtacaa

SEQ ID NO: 25109 - DNA, 26 bp, Homo sapiens
gagaaaaaagtcagtgcaggtacaaa

SEQ ID NO: 25110 - DNA, 26 bp, Homo sapiens
agaaaaaagtcagtgcaggtacaaag

SEQ ID NO: 25111 - DNA, 26 bp, Homo sapiens
gaaaaaagtcagtgcaggtacaaagg

SEQ ID NO: 25112 - DNA, 26 bp, Homo sapiens
aaaaaagtcagtgcaggtacaaaggg

SEQ ID NO: 25113 - DNA, 26 bp, Homo sapiens
aaaaagtcagtgcaggtacaaaggga

SEQ ID NO: 25114 - DNA, 26 bp, Homo sapiens
aaaagtcagtgcaggtacaaagggaa

SEQ ID NO: 25115 - DNA, 26 bp, Homo sapiens
aaagtcagtgcaggtacaaagggaag

SEQ ID NO: 25116 - DNA, 26 bp, Homo sapiens
aagtcagtgcaggtacaaagggaagc

SEQ ID NO: 25117 - DNA, 26 bp, Homo sapiens
agtcagtgcaggtacaaagggaagcc

SEQ ID NO: 25118 - DNA, 26 bp, Homo sapiens
gtcagtgcaggtacaaagggaagcct

SEQ ID NO: 25119 - DNA, 26 bp, Homo sapiens
tcagtgcaggtacaaagggaagcctg

SEQ ID NO: 25120 - DNA, 26 bp, Homo sapiens
cagtgcaggtacaaagggaagcctgc

SEQ ID NO: 25121 - DNA, 26 bp, Homo sapiens
agtgcaggtacaaagggaagcctgcc

SEQ ID NO: 25122 - DNA, 26 bp, Homo sapiens
gtgcaggtacaaagggaagcctgcct

SEQ ID NO: 25123 - DNA, 26 bp, Homo sapiens
tgcaggtacaaagggaagcctgcctt

SEQ ID NO: 25124 - DNA, 26 bp, Homo sapiens
gcaggtacaaagggaagcctgccttc

SEQ ID NO: 25125 - DNA, 26 bp, Homo sapiens
caggtacaaagggaagcctgccttcc

SEQ ID NO: 25126 - DNA, 26 bp, Homo sapiens
aggtacaaagggaagcctgccttcct

SEQ ID NO: 25127 - DNA, 26 bp, Homo sapiens
ggtacaaagggaagcctgccttcctc

SEQ ID NO: 25128 - DNA, 26 bp, Homo sapiens
gtacaaagggaagcctgccttcctca

SEQ ID NO: 25129 - DNA, 26 bp, Homo sapiens
tacaaagggaagcctgccttcctcag

SEQ ID NO: 25130 - DNA, 26 bp, Homo sapiens
acaaagggaagcctgccttcctcaga

SEQ ID NO: 25131 - DNA, 26 bp, Homo sapiens
caaagggaagcctgccttcctcagaa

SEQ ID NO: 25132 - DNA, 26 bp, Homo sapiens
aaagggaagcctgccttcctcagaag

SEQ ID NO: 25133 - DNA, 26 bp, Homo sapiens
aagggaagcctgccttcctcagaaga

SEQ ID NO: 25134 - DNA, 26 bp, Homo sapiens
agggaagcctgccttcctcagaagag

SEQ ID NO: 25135 - DNA, 26 bp, Homo sapiens
gggaagcctgccttcctcagaagagc

SEQ ID NO: 25136 - DNA, 26 bp, Homo sapiens
ggaagcctgccttcctcagaagagct

SEQ ID NO: 25137 - DNA, 26 bp, Homo sapiens
gaagcctgccttcctcagaagagctc

SEQ ID NO: 25138 - DNA, 26 bp, Homo sapiens
aagcctgccttcctcagaagagctct

SEQ ID NO: 25139 - DNA, 26 bp, Homo sapiens
agcctgccttcctcagaagagctctg

SEQ ID NO: 25140 - DNA, 26 bp, Homo sapiens
gcctgccttcctcagaagagctctgg

SEQ ID NO: 25141 - DNA, 26 bp, Homo sapiens
cctgccttcctcagaagagctctggc

SEQ ID NO: 25142 - DNA, 26 bp, Homo sapiens
ctgccttcctcagaagagctctggcc

SEQ ID NO: 25143 - DNA, 26 bp, Homo sapiens
tgccttcctcagaagagctctggccc

SEQ ID NO: 25144 - DNA, 26 bp, Homo sapiens
gccttcctcagaagagctctggcccc

SEQ ID NO: 25145 - DNA, 26 bp, Homo sapiens
ccttcctcagaagagctctggccccc

SEQ ID NO: 25146 - DNA, 26 bp, Homo sapiens
cttcctcagaagagctctggcccccg

SEQ ID NO: 25147 - DNA, 26 bp, Homo sapiens
ttcctcagaagagctctggcccccgt

SEQ ID NO: 25148 - DNA, 26 bp, Homo sapiens
tcctcagaagagctctggcccccgtt

SEQ ID NO: 25149 - DNA, 26 bp, Homo sapiens
cctcagaagagctctggcccccgttg

SEQ ID NO: 25150 - DNA, 26 bp, Homo sapiens
ctcagaagagctctggcccccgttgt

SEQ ID NO: 25151 - DNA, 26 bp, Homo sapiens
tcagaagagctctggcccccgttgta

SEQ ID NO: 25152 - DNA, 26 bp, Homo sapiens
cagaagagctctggcccccgttgtac

SEQ ID NO: 25153 - DNA, 26 bp, Homo sapiens
agaagagctctggcccccgttgtaca

SEQ ID NO: 25154 - DNA, 26 bp, Homo sapiens
gaagagctctggcccccgttgtacag

SEQ ID NO: 25155 - DNA, 26 bp, Homo sapiens
aagagctctggcccccgttgtacaga

SEQ ID NO: 25156 - DNA, 26 bp, Homo sapiens
agagctctggcccccgttgtacagag

SEQ ID NO: 25157 - DNA, 26 bp, Homo sapiens
gagctctggcccccgttgtacagaga

SEQ ID NO: 25158 - DNA, 26 bp, Homo sapiens
agctctggcccccgttgtacagagat

SEQ ID NO: 25159 - DNA, 26 bp, Homo sapiens
gctctggcccccgttgtacagagatc

SEQ ID NO: 25160 - DNA, 26 bp, Homo sapiens
ctctggcccccgttgtacagagatca

SEQ ID NO: 25161 - DNA, 26 bp, Homo sapiens
tctggcccccgttgtacagagatcag

SEQ ID NO: 25162 - DNA, 26 bp, Homo sapiens
ctggcccccgttgtacagagatcagc

SEQ ID NO: 25163 - DNA, 26 bp, Homo sapiens
tggcccccgttgtacagagatcagcg

SEQ ID NO: 25164 - DNA, 26 bp, Homo sapiens
ggcccccgttgtacagagatcagcga

SEQ ID NO: 25165 - DNA, 26 bp, Homo sapiens
gcccccgttgtacagagatcagcgag

SEQ ID NO: 25166 - DNA, 26 bp, Homo sapiens
cccccgttgtacagagatcagcgagg

SEQ ID NO: 25167 - DNA, 26 bp, Homo sapiens
ccccgttgtacagagatcagcgaggc

SEQ ID NO: 25168 - DNA, 26 bp, Homo sapiens
cccgttgtacagagatcagcgaggcc

SEQ ID NO: 25169 - DNA, 26 bp, Homo sapiens
ccgttgtacagagatcagcgaggcct

SEQ ID NO: 25170 - DNA, 26 bp, Homo sapiens
cgttgtacagagatcagcgaggccta

SEQ ID NO: 25171 - DNA, 26 bp, Homo sapiens
gttgtacagagatcagcgaggcctag

SEQ ID NO: 25172 - DNA, 26 bp, Homo sapiens
ttgtacagagatcagcgaggcctagg

SEQ ID NO: 25173 - DNA, 26 bp, Homo sapiens
tgtacagagatcagcgaggcctaggg

SEQ ID NO: 25174 - DNA, 26 bp, Homo sapiens
gtacagagatcagcgaggcctagggt

SEQ ID NO: 25175 - DNA, 26 bp, Homo sapiens
tacagagatcagcgaggcctagggtg

SEQ ID NO: 25176 - DNA, 26 bp, Homo sapiens
acagagatcagcgaggcctagggtga

SEQ ID NO: 25177 - DNA, 26 bp, Homo sapiens
cagagatcagcgaggcctagggtgaa

SEQ ID NO: 25178 - DNA, 26 bp, Homo sapiens
agagatcagcgaggcctagggtgaat

SEQ ID NO: 25179 - DNA, 26 bp, Homo sapiens
gagatcagcgaggcctagggtgaatc

SEQ ID NO: 25180 - DNA, 26 bp, Homo sapiens
agatcagcgaggcctagggtgaatct

SEQ ID NO: 25181 - DNA, 26 bp, Homo sapiens
gatcagcgaggcctagggtgaatcta

SEQ ID NO: 25182 - DNA, 26 bp, Homo sapiens
atcagcgaggcctagggtgaatctag

SEQ ID NO: 25183 - DNA, 26 bp, Homo sapiens
tcagcgaggcctagggtgaatctagt

SEQ ID NO: 25184 - DNA, 26 bp, Homo sapiens
cagcgaggcctagggtgaatctagtt

SEQ ID NO: 25185 - DNA, 26 bp, Homo sapiens
agcgaggcctagggtgaatctagttc

SEQ ID NO: 25186 - DNA, 26 bp, Homo sapiens
gcgaggcctagggtgaatctagttcc

SEQ ID NO: 25187 - DNA, 26 bp, Homo sapiens
cgaggcctagggtgaatctagttcca

SEQ ID NO: 25188 - DNA, 26 bp, Homo sapiens
gaggcctagggtgaatctagttccac

SEQ ID NO: 25189 - DNA, 26 bp, Homo sapiens
aggcctagggtgaatctagttccacc

SEQ ID NO: 25190 - DNA, 26 bp, Homo sapiens
ggcctagggtgaatctagttccaccc

SEQ ID NO: 25191 - DNA, 26 bp, Homo sapiens
gcctagggtgaatctagttccacccc

SEQ ID NO: 25192 - DNA, 26 bp, Homo sapiens
cctagggtgaatctagttccacccct

SEQ ID NO: 25193 - DNA, 26 bp, Homo sapiens
ctagggtgaatctagttccacccctc

SEQ ID NO: 25194 - DNA, 26 bp, Homo sapiens
tagggtgaatctagttccacccctca

SEQ ID NO: 25195 - DNA, 26 bp, Homo sapiens
agggtgaatctagttccacccctcat

SEQ ID NO: 25196 - DNA, 26 bp, Homo sapiens
gggtgaatctagttccacccctcatg

SEQ ID NO: 25197 - DNA, 26 bp, Homo sapiens
ggtgaatctagttccacccctcatga

SEQ ID NO: 25198 - DNA, 26 bp, Homo sapiens
gtgaatctagttccacccctcatgag

SEQ ID NO: 25199 - DNA, 26 bp, Homo sapiens
tgaatctagttccacccctcatgagc

SEQ ID NO: 25200 - DNA, 26 bp, Homo sapiens
gaatctagttccacccctcatgagct

SEQ ID NO: 25201 - DNA, 26 bp, Homo sapiens
aatctagttccacccctcatgagctg

SEQ ID NO: 25202 - DNA, 26 bp, Homo sapiens
atctagttccacccctcatgagctgt

SEQ ID NO: 25203 - DNA, 26 bp, Homo sapiens
tctagttccacccctcatgagctgtg

SEQ ID NO: 25204 - DNA, 26 bp, Homo sapiens
ctagttccacccctcatgagctgtgt

SEQ ID NO: 25205 - DNA, 26 bp, Homo sapiens
tagttccacccctcatgagctgtgtg

SEQ ID NO: 25206 - DNA, 26 bp, Homo sapiens
agttccacccctcatgagctgtgtga

SEQ ID NO: 25207 - DNA, 26 bp, Homo sapiens
gttccacccctcatgagctgtgtgac

SEQ ID NO: 25208 - DNA, 26 bp, Homo sapiens
ttccacccctcatgagctgtgtgacc

SEQ ID NO: 25209 - DNA, 26 bp, Homo sapiens
tccacccctcatgagctgtgtgacct

SEQ ID NO: 25210 - DNA, 26 bp, Homo sapiens
ccacccctcatgagctgtgtgacctc

SEQ ID NO: 25211 - DNA, 26 bp, Homo sapiens
cacccctcatgagctgtgtgacctca

SEQ ID NO: 25212 - DNA, 26 bp, Homo sapiens
acccctcatgagctgtgtgacctcag

SEQ ID NO: 25213 - DNA, 26 bp, Homo sapiens
cccctcatgagctgtgtgacctcaga

SEQ ID NO: 25214 - DNA, 26 bp, Homo sapiens
ccctcatgagctgtgtgacctcagaa

SEQ ID NO: 25215 - DNA, 26 bp, Homo sapiens
cctcatgagctgtgtgacctcagaac

SEQ ID NO: 25216 - DNA, 26 bp, Homo sapiens
ctcatgagctgtgtgacctcagaaca

SEQ ID NO: 25217 - DNA, 26 bp, Homo sapiens
tcatgagctgtgtgacctcagaacag

SEQ ID NO: 25218 - DNA, 26 bp, Homo sapiens
catgagctgtgtgacctcagaacagc

SEQ ID NO: 25219 - DNA, 26 bp, Homo sapiens
atgagctgtgtgacctcagaacagca

SEQ ID NO: 25220 - DNA, 26 bp, Homo sapiens
tgagctgtgtgacctcagaacagcag

SEQ ID NO: 25221 - DNA, 26 bp, Homo sapiens
gagctgtgtgacctcagaacagcagc

SEQ ID NO: 25222 - DNA, 26 bp, Homo sapiens
agctgtgtgacctcagaacagcagct

SEQ ID NO: 25223 - DNA, 26 bp, Homo sapiens
gctgtgtgacctcagaacagcagctg

SEQ ID NO: 25224 - DNA, 26 bp, Homo sapiens
ctgtgtgacctcagaacagcagctgc

SEQ ID NO: 25225 - DNA, 26 bp, Homo sapiens
tgtgtgacctcagaacagcagctgcc

SEQ ID NO: 25226 - DNA, 26 bp, Homo sapiens
gtgtgacctcagaacagcagctgccg

SEQ ID NO: 25227 - DNA, 26 bp, Homo sapiens
tgtgacctcagaacagcagctgccga

SEQ ID NO: 25228 - DNA, 26 bp, Homo sapiens
gtgacctcagaacagcagctgccgac

SEQ ID NO: 25229 - DNA, 26 bp, Homo sapiens
tgacctcagaacagcagctgccgaca

SEQ ID NO: 25230 - DNA, 26 bp, Homo sapiens
gacctcagaacagcagctgccgacag

SEQ ID NO: 25231 - DNA, 26 bp, Homo sapiens
acctcagaacagcagctgccgacaga

SEQ ID NO: 25232 - DNA, 26 bp, Homo sapiens
cctcagaacagcagctgccgacagat

SEQ ID NO: 25233 - DNA, 26 bp, Homo sapiens
ctcagaacagcagctgccgacagatc

SEQ ID NO: 25234 - DNA, 26 bp, Homo sapiens
tcagaacagcagctgccgacagatcc

SEQ ID NO: 25235 - DNA, 26 bp, Homo sapiens
cagaacagcagctgccgacagatcct

SEQ ID NO: 25236 - DNA, 26 bp, Homo sapiens
agaacagcagctgccgacagatcctg

SEQ ID NO: 25237 - DNA, 26 bp, Homo sapiens
gaacagcagctgccgacagatcctgg

SEQ ID NO: 25238 - DNA, 26 bp, Homo sapiens
aacagcagctgccgacagatcctgga

SEQ ID NO: 25239 - DNA, 26 bp, Homo sapiens
acagcagctgccgacagatcctggag

SEQ ID NO: 25240 - DNA, 26 bp, Homo sapiens
cagcagctgccgacagatcctggagg

SEQ ID NO: 25241 - DNA, 26 bp, Homo sapiens
agcagctgccgacagatcctggaggc

SEQ ID NO: 25242 - DNA, 26 bp, Homo sapiens
gcagctgccgacagatcctggaggcg

SEQ ID NO: 25243 - DNA, 26 bp, Homo sapiens
cagctgccgacagatcctggaggcgt

SEQ ID NO: 25244 - DNA, 26 bp, Homo sapiens
agctgccgacagatcctggaggcgtc

SEQ ID NO: 25245 - DNA, 26 bp, Homo sapiens
gctgccgacagatcctggaggcgtct

SEQ ID NO: 25246 - DNA, 26 bp, Homo sapiens
ctgccgacagatcctggaggcgtctg

SEQ ID NO: 25247 - DNA, 26 bp, Homo sapiens
tgccgacagatcctggaggcgtctgc

SEQ ID NO: 25248 - DNA, 26 bp, Homo sapiens
gccgacagatcctggaggcgtctgct

SEQ ID NO: 25249 - DNA, 26 bp, Homo sapiens
ccgacagatcctggaggcgtctgctc

SEQ ID NO: 25250 - DNA, 26 bp, Homo sapiens
cgacagatcctggaggcgtctgctca

SEQ ID NO: 25251 - DNA, 26 bp, Homo sapiens
gacagatcctggaggcgtctgctcag

SEQ ID NO: 25252 - DNA, 26 bp, Homo sapiens
acagatcctggaggcgtctgctcagt

SEQ ID NO: 25253 - DNA, 26 bp, Homo sapiens
cagatcctggaggcgtctgctcagtc

SEQ ID NO: 25254 - DNA, 26 bp, Homo sapiens
agatcctggaggcgtctgctcagtct

SEQ ID NO: 25255 - DNA, 26 bp, Homo sapiens
gatcctggaggcgtctgctcagtctc

SEQ ID NO: 25256 - DNA, 26 bp, Homo sapiens
atcctggaggcgtctgctcagtctca

SEQ ID NO: 25257 - DNA, 26 bp, Homo sapiens
tcctggaggcgtctgctcagtctcag

SEQ ID NO: 25258 - DNA, 26 bp, Homo sapiens
cctggaggcgtctgctcagtctcagc

SEQ ID NO: 25259 - DNA, 26 bp, Homo sapiens
ctggaggcgtctgctcagtctcagcg

SEQ ID NO: 25260 - DNA, 26 bp, Homo sapiens
tggaggcgtctgctcagtctcagcgg

SEQ ID NO: 25261 - DNA, 26 bp, Homo sapiens
ggaggcgtctgctcagtctcagcggg

SEQ ID NO: 25262 - DNA, 26 bp, Homo sapiens
gaggcgtctgctcagtctcagcgggg

SEQ ID NO: 25263 - DNA, 26 bp, Homo sapiens
aggcgtctgctcagtctcagcgggga

SEQ ID NO: 25264 - DNA, 26 bp, Homo sapiens
ggcgtctgctcagtctcagcggggac

SEQ ID NO: 25265 - DNA, 26 bp, Homo sapiens
gcgtctgctcagtctcagcggggact

SEQ ID NO: 25266 - DNA, 26 bp, Homo sapiens
cgtctgctcagtctcagcggggactg

SEQ ID NO: 25267 - DNA, 26 bp, Homo sapiens
gtctgctcagtctcagcggggactgg

SEQ ID NO: 25268 - DNA, 26 bp, Homo sapiens
tctgctcagtctcagcggggactggg

SEQ ID NO: 25269 - DNA, 26 bp, Homo sapiens
ctgctcagtctcagcggggactgggt

SEQ ID NO: 25270 - DNA, 26 bp, Homo sapiens
tgctcagtctcagcggggactgggtg

SEQ ID NO: 25271 - DNA, 26 bp, Homo sapiens
gctcagtctcagcggggactgggtga

SEQ ID NO: 25272 - DNA, 26 bp, Homo sapiens
ctcagtctcagcggggactgggtgag

SEQ ID NO: 25273 - DNA, 26 bp, Homo sapiens
tcagtctcagcggggactgggtgagg

SEQ ID NO: 25274 - DNA, 26 bp, Homo sapiens
cagtctcagcggggactgggtgaggc

SEQ ID NO: 25275 - DNA, 26 bp, Homo sapiens
agtctcagcggggactgggtgaggca

SEQ ID NO: 25276 - DNA, 26 bp, Homo sapiens
gtctcagcggggactgggtgaggcag

SEQ ID NO: 25277 - DNA, 26 bp, Homo sapiens
tctcagcggggactgggtgaggcaga

SEQ ID NO: 25278 - DNA, 26 bp, Homo sapiens
ctcagcggggactgggtgaggcagag

SEQ ID NO: 25279 - DNA, 26 bp, Homo sapiens
tcagcggggactgggtgaggcagagg

SEQ ID NO: 25280 - DNA, 26 bp, Homo sapiens
cagcggggactgggtgaggcagagga

SEQ ID NO: 25281 - DNA, 26 bp, Homo sapiens
agcggggactgggtgaggcagaggat

SEQ ID NO: 25282 - DNA, 26 bp, Homo sapiens
gcggggactgggtgaggcagaggatg

SEQ ID NO: 25283 - DNA, 26 bp, Homo sapiens
cggggactgggtgaggcagaggatgg

SEQ ID NO: 25284 - DNA, 26 bp, Homo sapiens
ggggactgggtgaggcagaggatgga

SEQ ID NO: 25285 - DNA, 26 bp, Homo sapiens
gggactgggtgaggcagaggatggag

SEQ ID NO: 25286 - DNA, 26 bp, Homo sapiens
ggactgggtgaggcagaggatggaga

SEQ ID NO: 25287 - DNA, 26 bp, Homo sapiens
gactgggtgaggcagaggatggagag

SEQ ID NO: 25288 - DNA, 26 bp, Homo sapiens
actgggtgaggcagaggatggagagg

SEQ ID NO: 25289 - DNA, 26 bp, Homo sapiens
ctgggtgaggcagaggatggagaggg

SEQ ID NO: 25290 - DNA, 26 bp, Homo sapiens
tgggtgaggcagaggatggagagggc

SEQ ID NO: 25291 - DNA, 26 bp, Homo sapiens
gggtgaggcagaggatggagagggct

SEQ ID NO: 25292 - DNA, 26 bp, Homo sapiens
ggtgaggcagaggatggagagggctt

SEQ ID NO: 25293 - DNA, 26 bp, Homo sapiens
gtgaggcagaggatggagagggcttt

SEQ ID NO: 25294 - DNA, 26 bp, Homo sapiens
tgaggcagaggatggagagggcttta

SEQ ID NO: 25295 - DNA, 26 bp, Homo sapiens
gaggcagaggatggagagggctttaa

SEQ ID NO: 25296 - DNA, 26 bp, Homo sapiens
aggcagaggatggagagggctttaag

SEQ ID NO: 25297 - DNA, 26 bp, Homo sapiens
ggcagaggatggagagggctttaagc

SEQ ID NO: 25298 - DNA, 26 bp, Homo sapiens
gcagaggatggagagggctttaagca

SEQ ID NO: 25299 - DNA, 26 bp, Homo sapiens
cagaggatggagagggctttaagcag

SEQ ID NO: 25300 - DNA, 26 bp, Homo sapiens
agaggatggagagggctttaagcagg

SEQ ID NO: 25301 - DNA, 26 bp, Homo sapiens
gaggatggagagggctttaagcaggc

SEQ ID NO: 25302 - DNA, 26 bp, Homo sapiens
aggatggagagggctttaagcaggca

SEQ ID NO: 25303 - DNA, 26 bp, Homo sapiens
ggatggagagggctttaagcaggcat

SEQ ID NO: 25304 - DNA, 26 bp, Homo sapiens
gatggagagggctttaagcaggcatg

SEQ ID NO: 25305 - DNA, 26 bp, Homo sapiens
atggagagggctttaagcaggcatgt

SEQ ID NO: 25306 - DNA, 26 bp, Homo sapiens
tggagagggctttaagcaggcatgtg

SEQ ID NO: 25307 - DNA, 26 bp, Homo sapiens
ggagagggctttaagcaggcatgtgg

SEQ ID NO: 25308 - DNA, 26 bp, Homo sapiens
gagagggctttaagcaggcatgtggg

SEQ ID NO: 25309 - DNA, 26 bp, Homo sapiens
agagggctttaagcaggcatgtgggc

SEQ ID NO: 25310 - DNA, 26 bp, Homo sapiens
gagggctttaagcaggcatgtgggct

SEQ ID NO: 25311 - DNA, 26 bp, Homo sapiens
agggctttaagcaggcatgtgggctg

SEQ ID NO: 25312 - DNA, 26 bp, Homo sapiens
gggctttaagcaggcatgtgggctgg

SEQ ID NO: 25313 - DNA, 26 bp, Homo sapiens
ggctttaagcaggcatgtgggctggg

SEQ ID NO: 25314 - DNA, 26 bp, Homo sapiens
gctttaagcaggcatgtgggctgggg

SEQ ID NO: 25315 - DNA, 26 bp, Homo sapiens
ctttaagcaggcatgtgggctggggc

SEQ ID NO: 25316 - DNA, 26 bp, Homo sapiens
tttaagcaggcatgtgggctggggcc

SEQ ID NO: 25317 - DNA, 26 bp, Homo sapiens
ttaagcaggcatgtgggctggggcct

SEQ ID NO: 25318 - DNA, 26 bp, Homo sapiens
taagcaggcatgtgggctggggcctg

SEQ ID NO: 25319 - DNA, 26 bp, Homo sapiens
aagcaggcatgtgggctggggcctgg

SEQ ID NO: 25320 - DNA, 26 bp, Homo sapiens
agcaggcatgtgggctggggcctggt

SEQ ID NO: 25321 - DNA, 26 bp, Homo sapiens
gcaggcatgtgggctggggcctggtg

SEQ ID NO: 25322 - DNA, 26 bp, Homo sapiens
caggcatgtgggctggggcctggtga

SEQ ID NO: 25323 - DNA, 26 bp, Homo sapiens
aggcatgtgggctggggcctggtgag

SEQ ID NO: 25324 - DNA, 26 bp, Homo sapiens
ggcatgtgggctggggcctggtgagc

SEQ ID NO: 25325 - DNA, 26 bp, Homo sapiens
gcatgtgggctggggcctggtgagcc

SEQ ID NO: 25326 - DNA, 26 bp, Homo sapiens
catgtgggctggggcctggtgagcca

SEQ ID NO: 25327 - DNA, 26 bp, Homo sapiens
atgtgggctggggcctggtgagccag

SEQ ID NO: 25328 - DNA, 26 bp, Homo sapiens
tgtgggctggggcctggtgagccagc

SEQ ID NO: 25329 - DNA, 26 bp, Homo sapiens
gtgggctggggcctggtgagccagcc

SEQ ID NO: 25330 - DNA, 26 bp, Homo sapiens
tcttgacaatgtccttttaattgtac

SEQ ID NO: 25331 - DNA, 26 bp, Homo sapiens
cttgacaatgtccttttaattgtact

SEQ ID NO: 25332 - DNA, 26 bp, Homo sapiens
ttgacaatgtccttttaattgtactc

SEQ ID NO: 25333 - DNA, 26 bp, Homo sapiens
tgacaatgtccttttaattgtactct

SEQ ID NO: 25334 - DNA, 26 bp, Homo sapiens
gacaatgtccttttaattgtactctt

SEQ ID NO: 25335 - DNA, 26 bp, Homo sapiens
acaatgtccttttaattgtactcttt

SEQ ID NO: 25336 - DNA, 26 bp, Homo sapiens
caatgtccttttaattgtactctttt

SEQ ID NO: 25337 - DNA, 26 bp, Homo sapiens
aatgtccttttaattgtactcttttc

SEQ ID NO: 25338 - DNA, 26 bp, Homo sapiens
atgtccttttaattgtactcttttca

SEQ ID NO: 25339 - DNA, 26 bp, Homo sapiens
tgtccttttaattgtactcttttcaa

SEQ ID NO: 25340 - DNA, 26 bp, Homo sapiens
gtccttttaattgtactcttttcaaa

SEQ ID NO: 25341 - DNA, 26 bp, Homo sapiens
tccttttaattgtactcttttcaaaa

SEQ ID NO: 25342 - DNA, 26 bp, Homo sapiens
ccttttaattgtactcttttcaaaaa

SEQ ID NO: 25343 - DNA, 26 bp, Homo sapiens
cttttaattgtactcttttcaaaaaa

SEQ ID NO: 25344 - DNA, 26 bp, Homo sapiens
ttttaattgtactcttttcaaaaaat

SEQ ID NO: 25345 - DNA, 26 bp, Homo sapiens
tttaattgtactcttttcaaaaaatc

SEQ ID NO: 25346 - DNA, 26 bp, Homo sapiens
ttaattgtactcttttcaaaaaatct

SEQ ID NO: 25347 - DNA, 26 bp, Homo sapiens
taattgtactcttttcaaaaaatctc

SEQ ID NO: 25348 - DNA, 26 bp, Homo sapiens
aattgtactcttttcaaaaaatctcc

SEQ ID NO: 25349 - DNA, 26 bp, Homo sapiens
attgtactcttttcaaaaaatctcct

SEQ ID NO: 25350 - DNA, 26 bp, Homo sapiens
ttgtactcttttcaaaaaatctcctt

SEQ ID NO: 25351 - DNA, 26 bp, Homo sapiens
tgtactcttttcaaaaaatctccttt

SEQ ID NO: 25352 - DNA, 26 bp, Homo sapiens
gtactcttttcaaaaaatctcctttc

SEQ ID NO: 25353 - DNA, 26 bp, Homo sapiens
tactcttttcaaaaaatctcctttct

SEQ ID NO: 25354 - DNA, 26 bp, Homo sapiens
actcttttcaaaaaatctcctttctc

SEQ ID NO: 25355 - DNA, 26 bp, Homo sapiens
ctcttttcaaaaaatctcctttctca

SEQ ID NO: 25356 - DNA, 26 bp, Homo sapiens
tcttttcaaaaaatctcctttctcag

SEQ ID NO: 25357 - DNA, 26 bp, Homo sapiens
cttttcaaaaaatctcctttctcagt

SEQ ID NO: 25358 - DNA, 26 bp, Homo sapiens
ttttcaaaaaatctcctttctcagtt

SEQ ID NO: 25359 - DNA, 26 bp, Homo sapiens
tttcaaaaaatctcctttctcagtta

SEQ ID NO: 25360 - DNA, 26 bp, Homo sapiens
ttcaaaaaatctcctttctcagttaa

SEQ ID NO: 25361 - DNA, 26 bp, Homo sapiens
tcaaaaaatctcctttctcagttaaa

SEQ ID NO: 25362 - DNA, 26 bp, Homo sapiens
caaaaaatctcctttctcagttaaaa

SEQ ID NO: 25363 - DNA, 26 bp, Homo sapiens
aaaaaatctcctttctcagttaaaaa

SEQ ID NO: 25364 - DNA, 26 bp, Homo sapiens
aaaaatctcctttctcagttaaaaaa

SEQ ID NO: 25365 - DNA, 26 bp, Homo sapiens
aaaatctcctttctcagttaaaaaag

SEQ ID NO: 25366 - DNA, 26 bp, Homo sapiens
aaatctcctttctcagttaaaaaaga

SEQ ID NO: 25367 - DNA, 26 bp, Homo sapiens
aatctcctttctcagttaaaaaagac

SEQ ID NO: 25368 - DNA, 26 bp, Homo sapiens
atctcctttctcagttaaaaaagaca

SEQ ID NO: 25369 - DNA, 26 bp, Homo sapiens
tctcctttctcagttaaaaaagacaa

SEQ ID NO: 25370 - DNA, 26 bp, Homo sapiens
ctcctttctcagttaaaaaagacaag

SEQ ID NO: 25371 - DNA, 26 bp, Homo sapiens
tcctttctcagttaaaaaagacaagg

SEQ ID NO: 25372 - DNA, 26 bp, Homo sapiens
cctttctcagttaaaaaagacaaggc

SEQ ID NO: 25373 - DNA, 26 bp, Homo sapiens
ctttctcagttaaaaaagacaaggca

SEQ ID NO: 25374 - DNA, 26 bp, Homo sapiens
tttctcagttaaaaaagacaaggcat

SEQ ID NO: 25375 - DNA, 26 bp, Homo sapiens
ttctcagttaaaaaagacaaggcatg

SEQ ID NO: 25376 - DNA, 26 bp, Homo sapiens
tctcagttaaaaaagacaaggcatga

SEQ ID NO: 25377 - DNA, 26 bp, Homo sapiens
ctcagttaaaaaagacaaggcatgat

SEQ ID NO: 25378 - DNA, 26 bp, Homo sapiens
tcagttaaaaaagacaaggcatgatg

SEQ ID NO: 25379 - DNA, 26 bp, Homo sapiens
cagttaaaaaagacaaggcatgatga

SEQ ID NO: 25380 - DNA, 26 bp, Homo sapiens
agttaaaaaagacaaggcatgatgaa

SEQ ID NO: 25381 - DNA, 26 bp, Homo sapiens
gttaaaaaagacaaggcatgatgaag

SEQ ID NO: 25382 - DNA, 26 bp, Homo sapiens
ttaaaaaagacaaggcatgatgaaga

SEQ ID NO: 25383 - DNA, 26 bp, Homo sapiens
taaaaaagacaaggcatgatgaagac

SEQ ID NO: 25384 - DNA, 26 bp, Homo sapiens
aaaaaagacaaggcatgatgaagacc

SEQ ID NO: 25385 - DNA, 26 bp, Homo sapiens
aaaaagacaaggcatgatgaagacct

SEQ ID NO: 25386 - DNA, 26 bp, Homo sapiens
aaaagacaaggcatgatgaagacctg

SEQ ID NO: 25387 - DNA, 26 bp, Homo sapiens
aaagacaaggcatgatgaagacctgc

SEQ ID NO: 25388 - DNA, 26 bp, Homo sapiens
aagacaaggcatgatgaagacctgct

SEQ ID NO: 25389 - DNA, 26 bp, Homo sapiens
agacaaggcatgatgaagacctgctc

SEQ ID NO: 25390 - DNA, 26 bp, Homo sapiens
gacaaggcatgatgaagacctgctct

SEQ ID NO: 25391 - DNA, 26 bp, Homo sapiens
acaaggcatgatgaagacctgctcta

SEQ ID NO: 25392 - DNA, 26 bp, Homo sapiens
caaggcatgatgaagacctgctctag

SEQ ID NO: 25393 - DNA, 26 bp, Homo sapiens
aaggcatgatgaagacctgctctagc

SEQ ID NO: 25394 - DNA, 26 bp, Homo sapiens
aggcatgatgaagacctgctctagcc

SEQ ID NO: 25395 - DNA, 26 bp, Homo sapiens
ggcatgatgaagacctgctctagccc

SEQ ID NO: 25396 - DNA, 26 bp, Homo sapiens
gcatgatgaagacctgctctagccca

SEQ ID NO: 25397 - DNA, 26 bp, Homo sapiens
catgatgaagacctgctctagcccat

SEQ ID NO: 25398 - DNA, 26 bp, Homo sapiens
atgatgaagacctgctctagcccata

SEQ ID NO: 25399 - DNA, 26 bp, Homo sapiens
tgatgaagacctgctctagcccatac

SEQ ID NO: 25400 - DNA, 26 bp, Homo sapiens
gatgaagacctgctctagcccatact

SEQ ID NO: 25401 - DNA, 26 bp, Homo sapiens
atgaagacctgctctagcccatactg

SEQ ID NO: 25402 - DNA, 26 bp, Homo sapiens
tgaagacctgctctagcccatactgg

SEQ ID NO: 25403 - DNA, 26 bp, Homo sapiens
gaagacctgctctagcccatactggg

SEQ ID NO: 25404 - DNA, 26 bp, Homo sapiens
aagacctgctctagcccatactgggc

SEQ ID NO: 25405 - DNA, 26 bp, Homo sapiens
agacctgctctagcccatactgggcg

SEQ ID NO: 25406 - DNA, 26 bp, Homo sapiens
gacctgctctagcccatactgggcgg

SEQ ID NO: 25407 - DNA, 26 bp, Homo sapiens
acctgctctagcccatactgggcggt

SEQ ID NO: 25408 - DNA, 26 bp, Homo sapiens
cctgctctagcccatactgggcggtg

SEQ ID NO: 25409 - DNA, 26 bp, Homo sapiens
ctgctctagcccatactgggcggtga

SEQ ID NO: 25410 - DNA, 26 bp, Homo sapiens
tgctctagcccatactgggcggtgat

SEQ ID NO: 25411 - DNA, 26 bp, Homo sapiens
gctctagcccatactgggcggtgatc

SEQ ID NO: 25412 - DNA, 26 bp, Homo sapiens
ctctagcccatactgggcggtgatct

SEQ ID NO: 25413 - DNA, 26 bp, Homo sapiens
tctagcccatactgggcggtgatctc

SEQ ID NO: 25414 - DNA, 26 bp, Homo sapiens
ctagcccatactgggcggtgatctcg

SEQ ID NO: 25415 - DNA, 26 bp, Homo sapiens
tagcccatactgggcggtgatctcgg

SEQ ID NO: 25416 - DNA, 26 bp, Homo sapiens
agcccatactgggcggtgatctcggt

SEQ ID NO: 25417 - DNA, 26 bp, Homo sapiens
gcccatactgggcggtgatctcggtc

SEQ ID NO: 25418 - DNA, 26 bp, Homo sapiens
cccatactgggcggtgatctcggtcc

SEQ ID NO: 25419 - DNA, 26 bp, Homo sapiens
ccatactgggcggtgatctcggtcct

SEQ ID NO: 25420 - DNA, 26 bp, Homo sapiens
catactgggcggtgatctcggtcctg

SEQ ID NO: 25421 - DNA, 26 bp, Homo sapiens
atactgggcggtgatctcggtcctgg

SEQ ID NO: 25422 - DNA, 26 bp, Homo sapiens
tactgggcggtgatctcggtcctggg

SEQ ID NO: 25423 - DNA, 26 bp, Homo sapiens
actgggcggtgatctcggtcctgggg

SEQ ID NO: 25424 - DNA, 26 bp, Homo sapiens
ctgggcggtgatctcggtcctggggg

SEQ ID NO: 25425 - DNA, 26 bp, Homo sapiens
tgggcggtgatctcggtcctggggga

SEQ ID NO: 25426 - DNA, 26 bp, Homo sapiens
gggcggtgatctcggtcctgggggag

SEQ ID NO: 25427 - DNA, 26 bp, Homo sapiens
ggcggtgatctcggtcctgggggagg

SEQ ID NO: 25428 - DNA, 26 bp, Homo sapiens
gcggtgatctcggtcctgggggaggc

SEQ ID NO: 25429 - DNA, 26 bp, Homo sapiens
cggtgatctcggtcctgggggaggcc

SEQ ID NO: 25430 - DNA, 26 bp, Homo sapiens
ggtgatctcggtcctgggggaggcca

SEQ ID NO: 25431 - DNA, 26 bp, Homo sapiens
gtgatctcggtcctgggggaggccag

SEQ ID NO: 25432 - DNA, 26 bp, Homo sapiens
tgatctcggtcctgggggaggccagg

SEQ ID NO: 25433 - DNA, 26 bp, Homo sapiens
gatctcggtcctgggggaggccaggc

SEQ ID NO: 25434 - DNA, 26 bp, Homo sapiens
atctcggtcctgggggaggccaggcc

SEQ ID NO: 25435 - DNA, 26 bp, Homo sapiens
tctcggtcctgggggaggccaggccg

SEQ ID NO: 25436 - DNA, 26 bp, Homo sapiens
ctcggtcctgggggaggccaggccgg

SEQ ID NO: 25437 - DNA, 26 bp, Homo sapiens
tcggtcctgggggaggccaggccgga

SEQ ID NO: 25438 - DNA, 26 bp, Homo sapiens
cggtcctgggggaggccaggccggac

SEQ ID NO: 25439 - DNA, 26 bp, Homo sapiens
ggtcctgggggaggccaggccggact

SEQ ID NO: 25440 - DNA, 26 bp, Homo sapiens
gtcctgggggaggccaggccggactc

SEQ ID NO: 25441 - DNA, 26 bp, Homo sapiens
tcctgggggaggccaggccggactct

SEQ ID NO: 25442 - DNA, 26 bp, Homo sapiens
cctgggggaggccaggccggactctt

SEQ ID NO: 25443 - DNA, 26 bp, Homo sapiens
ctgggggaggccaggccggactcttc

SEQ ID NO: 25444 - DNA, 26 bp, Homo sapiens
tgggggaggccaggccggactcttcc

SEQ ID NO: 25445 - DNA, 26 bp, Homo sapiens
gggggaggccaggccggactcttcca

SEQ ID NO: 25446 - DNA, 26 bp, Homo sapiens
ggggaggccaggccggactcttccaa

SEQ ID NO: 25447 - DNA, 26 bp, Homo sapiens
gggaggccaggccggactcttccaag

SEQ ID NO: 25448 - DNA, 26 bp, Homo sapiens
ggaggccaggccggactcttccaagg

SEQ ID NO: 25449 - DNA, 26 bp, Homo sapiens
gaggccaggccggactcttccaaggc

SEQ ID NO: 25450 - DNA, 26 bp, Homo sapiens
aggccaggccggactcttccaaggcc

SEQ ID NO: 25451 - DNA, 26 bp, Homo sapiens
ggccaggccggactcttccaaggcct

SEQ ID NO: 25452 - DNA, 26 bp, Homo sapiens
gccaggccggactcttccaaggcctc

SEQ ID NO: 25453 - DNA, 26 bp, Homo sapiens
ccaggccggactcttccaaggcctcc

SEQ ID NO: 25454 - DNA, 26 bp, Homo sapiens
caggccggactcttccaaggcctcct

SEQ ID NO: 25455 - DNA, 26 bp, Homo sapiens
aggccggactcttccaaggcctcctc

SEQ ID NO: 25456 - DNA, 26 bp, Homo sapiens
ggccggactcttccaaggcctcctcc

SEQ ID NO: 25457 - DNA, 26 bp, Homo sapiens
gccggactcttccaaggcctcctccc

SEQ ID NO: 25458 - DNA, 26 bp, Homo sapiens
ccggactcttccaaggcctcctccct

SEQ ID NO: 25459 - DNA, 26 bp, Homo sapiens
cggactcttccaaggcctcctccctg

SEQ ID NO: 25460 - DNA, 26 bp, Homo sapiens
ggactcttccaaggcctcctccctgg

SEQ ID NO: 25461 - DNA, 26 bp, Homo sapiens
gactcttccaaggcctcctccctggg

SEQ ID NO: 25462 - DNA, 26 bp, Homo sapiens
actcttccaaggcctcctccctgggc

SEQ ID NO: 25463 - DNA, 26 bp, Homo sapiens
ctcttccaaggcctcctccctgggca

SEQ ID NO: 25464 - DNA, 26 bp, Homo sapiens
tcttccaaggcctcctccctgggcag

SEQ ID NO: 25465 - DNA, 26 bp, Homo sapiens
cttccaaggcctcctccctgggcagt

SEQ ID NO: 25466 - DNA, 26 bp, Homo sapiens
ttccaaggcctcctccctgggcagtc

SEQ ID NO: 25467 - DNA, 26 bp, Homo sapiens
tccaaggcctcctccctgggcagtcc

SEQ ID NO: 25468 - DNA, 26 bp, Homo sapiens
ccaaggcctcctccctgggcagtccc

SEQ ID NO: 25469 - DNA, 26 bp, Homo sapiens
caaggcctcctccctgggcagtccca

SEQ ID NO: 25470 - DNA, 26 bp, Homo sapiens
aaggcctcctccctgggcagtcccag

SEQ ID NO: 25471 - DNA, 26 bp, Homo sapiens
aggcctcctccctgggcagtcccagc

SEQ ID NO: 25472 - DNA, 26 bp, Homo sapiens
ggcctcctccctgggcagtcccagca

SEQ ID NO: 25473 - DNA, 26 bp, Homo sapiens
gcctcctccctgggcagtcccagcaa

SEQ ID NO: 25474 - DNA, 26 bp, Homo sapiens
cctcctccctgggcagtcccagcaat

SEQ ID NO: 25475 - DNA, 26 bp, Homo sapiens
ctcctccctgggcagtcccagcaatg

SEQ ID NO: 25476 - DNA, 26 bp, Homo sapiens
tcctccctgggcagtcccagcaatgg

SEQ ID NO: 25477 - DNA, 26 bp, Homo sapiens
cctccctgggcagtcccagcaatggg

SEQ ID NO: 25478 - DNA, 26 bp, Homo sapiens
ctccctgggcagtcccagcaatgggg

SEQ ID NO: 25479 - DNA, 26 bp, Homo sapiens
tccctgggcagtcccagcaatggggc

SEQ ID NO: 25480 - DNA, 26 bp, Homo sapiens
ccctgggcagtcccagcaatggggcc

SEQ ID NO: 25481 - DNA, 26 bp, Homo sapiens
cctgggcagtcccagcaatggggcca

SEQ ID NO: 25482 - DNA, 26 bp, Homo sapiens
ctgggcagtcccagcaatggggccag

SEQ ID NO: 25483 - DNA, 26 bp, Homo sapiens
tgggcagtcccagcaatggggccagt

SEQ ID NO: 25484 - DNA, 26 bp, Homo sapiens
gggcagtcccagcaatggggccagtg

SEQ ID NO: 25485 - DNA, 26 bp, Homo sapiens
ggcagtcccagcaatggggccagtgg

SEQ ID NO: 25486 - DNA, 26 bp, Homo sapiens
gcagtcccagcaatggggccagtggc

SEQ ID NO: 25487 - DNA, 26 bp, Homo sapiens
cagtcccagcaatggggccagtggca

SEQ ID NO: 25488 - DNA, 26 bp, Homo sapiens
agtcccagcaatggggccagtggcag

SEQ ID NO: 25489 - DNA, 26 bp, Homo sapiens
gtcccagcaatggggccagtggcagg

SEQ ID NO: 25490 - DNA, 26 bp, Homo sapiens
tcccagcaatggggccagtggcaggg

SEQ ID NO: 25491 - DNA, 26 bp, Homo sapiens
cccagcaatggggccagtggcagggc

SEQ ID NO: 25492 - DNA, 26 bp, Homo sapiens
ccagcaatggggccagtggcagggca

SEQ ID NO: 25493 - DNA, 26 bp, Homo sapiens
cagcaatggggccagtggcagggcag

SEQ ID NO: 25494 - DNA, 26 bp, Homo sapiens
agcaatggggccagtggcagggcagg

SEQ ID NO: 25495 - DNA, 26 bp, Homo sapiens
gcaatggggccagtggcagggcaggt

SEQ ID NO: 25496 - DNA, 26 bp, Homo sapiens
caatggggccagtggcagggcaggtt

SEQ ID NO: 25497 - DNA, 26 bp, Homo sapiens
aatggggccagtggcagggcaggttc

SEQ ID NO: 25498 - DNA, 26 bp, Homo sapiens
atggggccagtggcagggcaggttct

SEQ ID NO: 25499 - DNA, 26 bp, Homo sapiens
tggggccagtggcagggcaggttctc

SEQ ID NO: 25500 - DNA, 26 bp, Homo sapiens
ggggccagtggcagggcaggttctcc

SEQ ID NO: 25501 - DNA, 26 bp, Homo sapiens
gggccagtggcagggcaggttctccc

SEQ ID NO: 25502 - DNA, 26 bp, Homo sapiens
ggccagtggcagggcaggttctccct

SEQ ID NO: 25503 - DNA, 26 bp, Homo sapiens
gccagtggcagggcaggttctccctg

SEQ ID NO: 25504 - DNA, 26 bp, Homo sapiens
ccagtggcagggcaggttctccctgc

SEQ ID NO: 25505 - DNA, 26 bp, Homo sapiens
cagtggcagggcaggttctccctgcc

SEQ ID NO: 25506 - DNA, 26 bp, Homo sapiens
agtggcagggcaggttctccctgcca

SEQ ID NO: 25507 - DNA, 26 bp, Homo sapiens
gtggcagggcaggttctccctgccag

SEQ ID NO: 25508 - DNA, 26 bp, Homo sapiens
tggcagggcaggttctccctgccaga

SEQ ID NO: 25509 - DNA, 26 bp, Homo sapiens
ggcagggcaggttctccctgccagaa

SEQ ID NO: 25510 - DNA, 26 bp, Homo sapiens
gcagggcaggttctccctgccagaac

SEQ ID NO: 25511 - DNA, 26 bp, Homo sapiens
cagggcaggttctccctgccagaacc

SEQ ID NO: 25512 - DNA, 26 bp, Homo sapiens
agggcaggttctccctgccagaaccc

SEQ ID NO: 25513 - DNA, 26 bp, Homo sapiens
gggcaggttctccctgccagaacccg

SEQ ID NO: 25514 - DNA, 26 bp, Homo sapiens
ggcaggttctccctgccagaacccga

SEQ ID NO: 25515 - DNA, 26 bp, Homo sapiens
gcaggttctccctgccagaacccgat

SEQ ID NO: 25516 - DNA, 26 bp, Homo sapiens
caggttctccctgccagaacccgatc

SEQ ID NO: 25517 - DNA, 26 bp, Homo sapiens
aggttctccctgccagaacccgatcc

SEQ ID NO: 25518 - DNA, 26 bp, Homo sapiens
ggttctccctgccagaacccgatcct

SEQ ID NO: 25519 - DNA, 26 bp, Homo sapiens
gttctccctgccagaacccgatccta

SEQ ID NO: 25520 - DNA, 26 bp, Homo sapiens
ttctccctgccagaacccgatcctag

SEQ ID NO: 25521 - DNA, 26 bp, Homo sapiens
tctccctgccagaacccgatcctagc

SEQ ID NO: 25522 - DNA, 26 bp, Homo sapiens
ctccctgccagaacccgatcctagcc

SEQ ID NO: 25523 - DNA, 26 bp, Homo sapiens
tccctgccagaacccgatcctagccc

SEQ ID NO: 25524 - DNA, 26 bp, Homo sapiens
ccctgccagaacccgatcctagccct

SEQ ID NO: 25525 - DNA, 26 bp, Homo sapiens
cctgccagaacccgatcctagccctt

SEQ ID NO: 25526 - DNA, 26 bp, Homo sapiens
ctgccagaacccgatcctagcccttc

SEQ ID NO: 25527 - DNA, 26 bp, Homo sapiens
tgccagaacccgatcctagcccttca

SEQ ID NO: 25528 - DNA, 26 bp, Homo sapiens
gccagaacccgatcctagcccttcag

SEQ ID NO: 25529 - DNA, 26 bp, Homo sapiens
ccagaacccgatcctagcccttcaga

SEQ ID NO: 25530 - DNA, 26 bp, Homo sapiens
cagaacccgatcctagcccttcagaa

SEQ ID NO: 25531 - DNA, 26 bp, Homo sapiens
agaacccgatcctagcccttcagaag

SEQ ID NO: 25532 - DNA, 26 bp, Homo sapiens
gaacccgatcctagcccttcagaagg

SEQ ID NO: 25533 - DNA, 26 bp, Homo sapiens
aacccgatcctagcccttcagaagga

SEQ ID NO: 25534 - DNA, 26 bp, Homo sapiens
acccgatcctagcccttcagaaggac

SEQ ID NO: 25535 - DNA, 26 bp, Homo sapiens
cccgatcctagcccttcagaaggact

SEQ ID NO: 25536 - DNA, 26 bp, Homo sapiens
ccgatcctagcccttcagaaggactg

SEQ ID NO: 25537 - DNA, 26 bp, Homo sapiens
cgatcctagcccttcagaaggactgg

SEQ ID NO: 25538 - DNA, 26 bp, Homo sapiens
gatcctagcccttcagaaggactgga

SEQ ID NO: 25539 - DNA, 26 bp, Homo sapiens
atcctagcccttcagaaggactggac

SEQ ID NO: 25540 - DNA, 26 bp, Homo sapiens
tcctagcccttcagaaggactggacc

SEQ ID NO: 25541 - DNA, 26 bp, Homo sapiens
cctagcccttcagaaggactggacct

SEQ ID NO: 25542 - DNA, 26 bp, Homo sapiens
ctagcccttcagaaggactggacctc

SEQ ID NO: 25543 - DNA, 26 bp, Homo sapiens
tagcccttcagaaggactggacctct

SEQ ID NO: 25544 - DNA, 26 bp, Homo sapiens
agcccttcagaaggactggacctctg

SEQ ID NO: 25545 - DNA, 26 bp, Homo sapiens
gcccttcagaaggactggacctctgt

SEQ ID NO: 25546 - DNA, 26 bp, Homo sapiens
cccttcagaaggactggacctctgtg

SEQ ID NO: 25547 - DNA, 26 bp, Homo sapiens
ccttcagaaggactggacctctgtgt

SEQ ID NO: 25548 - DNA, 26 bp, Homo sapiens
cttcagaaggactggacctctgtgtc

SEQ ID NO: 25549 - DNA, 26 bp, Homo sapiens
ttcagaaggactggacctctgtgtcc

SEQ ID NO: 25550 - DNA, 26 bp, Homo sapiens
tcagaaggactggacctctgtgtccc

SEQ ID NO: 25551 - DNA, 26 bp, Homo sapiens
cagaaggactggacctctgtgtccct

SEQ ID NO: 25552 - DNA, 26 bp, Homo sapiens
agaaggactggacctctgtgtccctt

SEQ ID NO: 25553 - DNA, 26 bp, Homo sapiens
gaaggactggacctctgtgtcccttc

SEQ ID NO: 25554 - DNA, 26 bp, Homo sapiens
aaggactggacctctgtgtcccttca

SEQ ID NO: 25555 - DNA, 26 bp, Homo sapiens
aggactggacctctgtgtcccttcag

SEQ ID NO: 25556 - DNA, 26 bp, Homo sapiens
ggactggacctctgtgtcccttcagt

SEQ ID NO: 25557 - DNA, 26 bp, Homo sapiens
gactggacctctgtgtcccttcagtg

SEQ ID NO: 25558 - DNA, 26 bp, Homo sapiens
actggacctctgtgtcccttcagtgg

SEQ ID NO: 25559 - DNA, 26 bp, Homo sapiens
ctggacctctgtgtcccttcagtggg

SEQ ID NO: 25560 - DNA, 26 bp, Homo sapiens
tggacctctgtgtcccttcagtggga

SEQ ID NO: 25561 - DNA, 26 bp, Homo sapiens
ggacctctgtgtcccttcagtgggaa

SEQ ID NO: 25562 - DNA, 26 bp, Homo sapiens
gacctctgtgtcccttcagtgggaag

SEQ ID NO: 25563 - DNA, 26 bp, Homo sapiens
acctctgtgtcccttcagtgggaagc

SEQ ID NO: 25564 - DNA, 26 bp, Homo sapiens
cctctgtgtcccttcagtgggaagcc

SEQ ID NO: 25565 - DNA, 26 bp, Homo sapiens
ctctgtgtcccttcagtgggaagcca

SEQ ID NO: 25566 - DNA, 26 bp, Homo sapiens
tctgtgtcccttcagtgggaagccac

SEQ ID NO: 25567 - DNA, 26 bp, Homo sapiens
ctgtgtcccttcagtgggaagccacc

SEQ ID NO: 25568 - DNA, 26 bp, Homo sapiens
tgtgtcccttcagtgggaagccacct

SEQ ID NO: 25569 - DNA, 26 bp, Homo sapiens
gtgtcccttcagtgggaagccacctt

SEQ ID NO: 25570 - DNA, 26 bp, Homo sapiens
tgtcccttcagtgggaagccaccttg

SEQ ID NO: 25571 - DNA, 26 bp, Homo sapiens
gtcccttcagtgggaagccaccttgg

SEQ ID NO: 25572 - DNA, 26 bp, Homo sapiens
tcccttcagtgggaagccaccttgga

SEQ ID NO: 25573 - DNA, 26 bp, Homo sapiens
cccttcagtgggaagccaccttggac

SEQ ID NO: 25574 - DNA, 26 bp, Homo sapiens
ccttcagtgggaagccaccttggaca

SEQ ID NO: 25575 - DNA, 26 bp, Homo sapiens
cttcagtgggaagccaccttggacac

SEQ ID NO: 25576 - DNA, 26 bp, Homo sapiens
ttcagtgggaagccaccttggacaca

SEQ ID NO: 25577 - DNA, 26 bp, Homo sapiens
tcagtgggaagccaccttggacacac

SEQ ID NO: 25578 - DNA, 26 bp, Homo sapiens
cagtgggaagccaccttggacacacg

SEQ ID NO: 25579 - DNA, 26 bp, Homo sapiens
agtgggaagccaccttggacacacgc

SEQ ID NO: 25580 - DNA, 26 bp, Homo sapiens
gtgggaagccaccttggacacacgca

SEQ ID NO: 25581 - DNA, 26 bp, Homo sapiens
tgggaagccaccttggacacacgcag

SEQ ID NO: 25582 - DNA, 26 bp, Homo sapiens
gggaagccaccttggacacacgcagt

SEQ ID NO: 25583 - DNA, 26 bp, Homo sapiens
ggaagccaccttggacacacgcagtc

SEQ ID NO: 25584 - DNA, 26 bp, Homo sapiens
gaagccaccttggacacacgcagtca

SEQ ID NO: 25585 - DNA, 26 bp, Homo sapiens
aagccaccttggacacacgcagtcat

SEQ ID NO: 25586 - DNA, 26 bp, Homo sapiens
agccaccttggacacacgcagtcatt

SEQ ID NO: 25587 - DNA, 26 bp, Homo sapiens
gccaccttggacacacgcagtcattc

SEQ ID NO: 25588 - DNA, 26 bp, Homo sapiens
ccaccttggacacacgcagtcattca

SEQ ID NO: 25589 - DNA, 26 bp, Homo sapiens
caccttggacacacgcagtcattcag

SEQ ID NO: 25590 - DNA, 26 bp, Homo sapiens
accttggacacacgcagtcattcagg

SEQ ID NO: 25591 - DNA, 26 bp, Homo sapiens
ccttggacacacgcagtcattcaggt

SEQ ID NO: 25592 - DNA, 26 bp, Homo sapiens
cttggacacacgcagtcattcaggtg

SEQ ID NO: 25593 - DNA, 26 bp, Homo sapiens
ttggacacacgcagtcattcaggtgg

SEQ ID NO: 25594 - DNA, 26 bp, Homo sapiens
tggacacacgcagtcattcaggtgga

SEQ ID NO: 25595 - DNA, 26 bp, Homo sapiens
ggacacacgcagtcattcaggtggac

SEQ ID NO: 25596 - DNA, 26 bp, Homo sapiens
gacacacgcagtcattcaggtggaca

SEQ ID NO: 25597 - DNA, 26 bp, Homo sapiens
acacacgcagtcattcaggtggacat

SEQ ID NO: 25598 - DNA, 26 bp, Homo sapiens
cacacgcagtcattcaggtggacata

SEQ ID NO: 25599 - DNA, 26 bp, Homo sapiens
acacgcagtcattcaggtggacataa

SEQ ID NO: 25600 - DNA, 26 bp, Homo sapiens
cacgcagtcattcaggtggacataag

SEQ ID NO: 25601 - DNA, 26 bp, Homo sapiens
acgcagtcattcaggtggacataagg

SEQ ID NO: 25602 - DNA, 26 bp, Homo sapiens
cgcagtcattcaggtggacataaggc

SEQ ID NO: 25603 - DNA, 26 bp, Homo sapiens
gcagtcattcaggtggacataaggcc

SEQ ID NO: 25604 - DNA, 26 bp, Homo sapiens
cagtcattcaggtggacataaggcca

SEQ ID NO: 25605 - DNA, 26 bp, Homo sapiens
agtcattcaggtggacataaggccac

SEQ ID NO: 25606 - DNA, 26 bp, Homo sapiens
gtcattcaggtggacataaggccact

SEQ ID NO: 25607 - DNA, 26 bp, Homo sapiens
tcattcaggtggacataaggccactc

SEQ ID NO: 25608 - DNA, 26 bp, Homo sapiens
cattcaggtggacataaggccactct

SEQ ID NO: 25609 - DNA, 26 bp, Homo sapiens
attcaggtggacataaggccactctt

SEQ ID NO: 25610 - DNA, 26 bp, Homo sapiens
ttcaggtggacataaggccactcttc

SEQ ID NO: 25611 - DNA, 26 bp, Homo sapiens
tcaggtggacataaggccactcttct

SEQ ID NO: 25612 - DNA, 26 bp, Homo sapiens
caggtggacataaggccactcttctc

SEQ ID NO: 25613 - DNA, 26 bp, Homo sapiens
aggtggacataaggccactcttctcg

SEQ ID NO: 25614 - DNA, 26 bp, Homo sapiens
ggtggacataaggccactcttctcgc

SEQ ID NO: 25615 - DNA, 26 bp, Homo sapiens
gtggacataaggccactcttctcgcc

SEQ ID NO: 25616 - DNA, 26 bp, Homo sapiens
tggacataaggccactcttctcgccc

SEQ ID NO: 25617 - DNA, 26 bp, Homo sapiens
ggacataaggccactcttctcgccct

SEQ ID NO: 25618 - DNA, 26 bp, Homo sapiens
gacataaggccactcttctcgccctt

SEQ ID NO: 25619 - DNA, 26 bp, Homo sapiens
acataaggccactcttctcgcccttg

SEQ ID NO: 25620 - DNA, 26 bp, Homo sapiens
cataaggccactcttctcgcccttga

SEQ ID NO: 25621 - DNA, 26 bp, Homo sapiens
ataaggccactcttctcgcccttgac

SEQ ID NO: 25622 - DNA, 26 bp, Homo sapiens
taaggccactcttctcgcccttgacc

SEQ ID NO: 25623 - DNA, 26 bp, Homo sapiens
aaggccactcttctcgcccttgacct

SEQ ID NO: 25624 - DNA, 26 bp, Homo sapiens
aggccactcttctcgcccttgacctt

SEQ ID NO: 25625 - DNA, 26 bp, Homo sapiens
ggccactcttctcgcccttgaccttg

SEQ ID NO: 25626 - DNA, 26 bp, Homo sapiens
gccactcttctcgcccttgaccttga

SEQ ID NO: 25627 - DNA, 26 bp, Homo sapiens
ccactcttctcgcccttgaccttgag

SEQ ID NO: 25628 - DNA, 26 bp, Homo sapiens
cactcttctcgcccttgaccttgagg

SEQ ID NO: 25629 - DNA, 26 bp, Homo sapiens
actcttctcgcccttgaccttgagga

SEQ ID NO: 25630 - DNA, 26 bp, Homo sapiens
ctcttctcgcccttgaccttgaggaa

SEQ ID NO: 25631 - DNA, 26 bp, Homo sapiens
tcttctcgcccttgaccttgaggaac

SEQ ID NO: 25632 - DNA, 26 bp, Homo sapiens
cttctcgcccttgaccttgaggaact

SEQ ID NO: 25633 - DNA, 26 bp, Homo sapiens
ttctcgcccttgaccttgaggaactc

SEQ ID NO: 25634 - DNA, 26 bp, Homo sapiens
tctcgcccttgaccttgaggaactca

SEQ ID NO: 25635 - DNA, 26 bp, Homo sapiens
ctcgcccttgaccttgaggaactcag

SEQ ID NO: 25636 - DNA, 26 bp, Homo sapiens
tcgcccttgaccttgaggaactcagc

SEQ ID NO: 25637 - DNA, 26 bp, Homo sapiens
cgcccttgaccttgaggaactcagcc

SEQ ID NO: 25638 - DNA, 26 bp, Homo sapiens
gcccttgaccttgaggaactcagcca

SEQ ID NO: 25639 - DNA, 26 bp, Homo sapiens
cccttgaccttgaggaactcagccat

SEQ ID NO: 25640 - DNA, 26 bp, Homo sapiens
ccttgaccttgaggaactcagccatg

SEQ ID NO: 25641 - DNA, 26 bp, Homo sapiens
cttgaccttgaggaactcagccatgc

SEQ ID NO: 25642 - DNA, 26 bp, Homo sapiens
ttgaccttgaggaactcagccatgct

SEQ ID NO: 25643 - DNA, 26 bp, Homo sapiens
tgaccttgaggaactcagccatgctg

SEQ ID NO: 25644 - DNA, 26 bp, Homo sapiens
gaccttgaggaactcagccatgctgg

SEQ ID NO: 25645 - DNA, 26 bp, Homo sapiens
accttgaggaactcagccatgctgga

SEQ ID NO: 25646 - DNA, 26 bp, Homo sapiens
ccttgaggaactcagccatgctggag

SEQ ID NO: 25647 - DNA, 26 bp, Homo sapiens
cttgaggaactcagccatgctggaga

SEQ ID NO: 25648 - DNA, 26 bp, Homo sapiens
ttgaggaactcagccatgctggagaa

SEQ ID NO: 25649 - DNA, 26 bp, Homo sapiens
tgaggaactcagccatgctggagaaa

SEQ ID NO: 25650 - DNA, 26 bp, Homo sapiens
gaggaactcagccatgctggagaaat

SEQ ID NO: 25651 - DNA, 26 bp, Homo sapiens
aggaactcagccatgctggagaaata

SEQ ID NO: 25652 - DNA, 26 bp, Homo sapiens
ggaactcagccatgctggagaaatac

SEQ ID NO: 25653 - DNA, 26 bp, Homo sapiens
gaactcagccatgctggagaaatact

SEQ ID NO: 25654 - DNA, 26 bp, Homo sapiens
aactcagccatgctggagaaatactt

SEQ ID NO: 25655 - DNA, 26 bp, Homo sapiens
actcagccatgctggagaaatacttc

SEQ ID NO: 25656 - DNA, 26 bp, Homo sapiens
ctcagccatgctggagaaatacttct

SEQ ID NO: 25657 - DNA, 26 bp, Homo sapiens
tcagccatgctggagaaatacttctg

SEQ ID NO: 25658 - DNA, 26 bp, Homo sapiens
cagccatgctggagaaatacttctgg

SEQ ID NO: 25659 - DNA, 26 bp, Homo sapiens
agccatgctggagaaatacttctggt

SEQ ID NO: 25660 - DNA, 26 bp, Homo sapiens
gccatgctggagaaatacttctggtt

SEQ ID NO: 25661 - DNA, 26 bp, Homo sapiens
ccatgctggagaaatacttctggttg

SEQ ID NO: 25662 - DNA, 26 bp, Homo sapiens
catgctggagaaatacttctggttgg

SEQ ID NO: 25663 - DNA, 26 bp, Homo sapiens
atgctggagaaatacttctggttggc

SEQ ID NO: 25664 - DNA, 26 bp, Homo sapiens
tgctggagaaatacttctggttggcc

SEQ ID NO: 25665 - DNA, 26 bp, Homo sapiens
gctggagaaatacttctggttggcct

SEQ ID NO: 25666 - DNA, 26 bp, Homo sapiens
ctggagaaatacttctggttggcctc

SEQ ID NO: 25667 - DNA, 26 bp, Homo sapiens
tggagaaatacttctggttggcctca

SEQ ID NO: 25668 - DNA, 26 bp, Homo sapiens
ggagaaatacttctggttggcctcag

SEQ ID NO: 25669 - DNA, 26 bp, Homo sapiens
gagaaatacttctggttggcctcagc

SEQ ID NO: 25670 - DNA, 26 bp, Homo sapiens
agaaatacttctggttggcctcagcc

SEQ ID NO: 25671 - DNA, 26 bp, Homo sapiens
gaaatacttctggttggcctcagcca

SEQ ID NO: 25672 - DNA, 26 bp, Homo sapiens
aaatacttctggttggcctcagccac

SEQ ID NO: 25673 - DNA, 26 bp, Homo sapiens
aatacttctggttggcctcagccacc

SEQ ID NO: 25674 - DNA, 26 bp, Homo sapiens
atacttctggttggcctcagccacct

SEQ ID NO: 25675 - DNA, 26 bp, Homo sapiens
tacttctggttggcctcagccacctt

SEQ ID NO: 25676 - DNA, 26 bp, Homo sapiens
acttctggttggcctcagccaccttc

SEQ ID NO: 25677 - DNA, 26 bp, Homo sapiens
cttctggttggcctcagccaccttct

SEQ ID NO: 25678 - DNA, 26 bp, Homo sapiens
ttctggttggcctcagccaccttctt

SEQ ID NO: 25679 - DNA, 26 bp, Homo sapiens
tctggttggcctcagccaccttcttc

SEQ ID NO: 25680 - DNA, 26 bp, Homo sapiens
ctggttggcctcagccaccttcttct

SEQ ID NO: 25681 - DNA, 26 bp, Homo sapiens
tggttggcctcagccaccttcttctc

SEQ ID NO: 25682 - DNA, 26 bp, Homo sapiens
ggttggcctcagccaccttcttctct

SEQ ID NO: 25683 - DNA, 26 bp, Homo sapiens
gttggcctcagccaccttcttctctg

SEQ ID NO: 25684 - DNA, 26 bp, Homo sapiens
ttggcctcagccaccttcttctctgc

SEQ ID NO: 25685 - DNA, 26 bp, Homo sapiens
tggcctcagccaccttcttctctgcc

SEQ ID NO: 25686 - DNA, 26 bp, Homo sapiens
ggcctcagccaccttcttctctgccg

SEQ ID NO: 25687 - DNA, 26 bp, Homo sapiens
gcctcagccaccttcttctctgccgc

SEQ ID NO: 25688 - DNA, 26 bp, Homo sapiens
cctcagccaccttcttctctgccgcc

SEQ ID NO: 25689 - DNA, 26 bp, Homo sapiens
ctcagccaccttcttctctgccgcct

SEQ ID NO: 25690 - DNA, 26 bp, Homo sapiens
tcagccaccttcttctctgccgcctg

SEQ ID NO: 25691 - DNA, 26 bp, Homo sapiens
cagccaccttcttctctgccgcctgt

SEQ ID NO: 25692 - DNA, 26 bp, Homo sapiens
agccaccttcttctctgccgcctgtg

SEQ ID NO: 25693 - DNA, 26 bp, Homo sapiens
gccaccttcttctctgccgcctgtgg

SEQ ID NO: 25694 - DNA, 26 bp, Homo sapiens
ccaccttcttctctgccgcctgtggg

SEQ ID NO: 25695 - DNA, 26 bp, Homo sapiens
caccttcttctctgccgcctgtgggt

SEQ ID NO: 25696 - DNA, 26 bp, Homo sapiens
accttcttctctgccgcctgtgggtt

SEQ ID NO: 25697 - DNA, 26 bp, Homo sapiens
ccttcttctctgccgcctgtgggttc

SEQ ID NO: 25698 - DNA, 26 bp, Homo sapiens
cttcttctctgccgcctgtgggttca

SEQ ID NO: 25699 - DNA, 26 bp, Homo sapiens
ttcttctctgccgcctgtgggttcac

SEQ ID NO: 25700 - DNA, 26 bp, Homo sapiens
tcttctctgccgcctgtgggttcaca

SEQ ID NO: 25701 - DNA, 26 bp, Homo sapiens
cttctctgccgcctgtgggttcacaa

SEQ ID NO: 25702 - DNA, 26 bp, Homo sapiens
ttctctgccgcctgtgggttcacaat

SEQ ID NO: 25703 - DNA, 26 bp, Homo sapiens
tctctgccgcctgtgggttcacaatc

SEQ ID NO: 25704 - DNA, 26 bp, Homo sapiens
ctctgccgcctgtgggttcacaatct

SEQ ID NO: 25705 - DNA, 26 bp, Homo sapiens
tctgccgcctgtgggttcacaatctc

SEQ ID NO: 25706 - DNA, 26 bp, Homo sapiens
ctgccgcctgtgggttcacaatctcc

SEQ ID NO: 25707 - DNA, 26 bp, Homo sapiens
tgccgcctgtgggttcacaatctcca

SEQ ID NO: 25708 - DNA, 26 bp, Homo sapiens
gccgcctgtgggttcacaatctccag

SEQ ID NO: 25709 - DNA, 26 bp, Homo sapiens
ccgcctgtgggttcacaatctccagg

SEQ ID NO: 25710 - DNA, 26 bp, Homo sapiens
cgcctgtgggttcacaatctccaggc

SEQ ID NO: 25711 - DNA, 26 bp, Homo sapiens
gcctgtgggttcacaatctccaggcc

SEQ ID NO: 25712 - DNA, 26 bp, Homo sapiens
cctgtgggttcacaatctccaggccc

SEQ ID NO: 25713 - DNA, 26 bp, Homo sapiens
ctgtgggttcacaatctccaggccct

SEQ ID NO: 25714 - DNA, 26 bp, Homo sapiens
tgtgggttcacaatctccaggccctg

SEQ ID NO: 25715 - DNA, 26 bp, Homo sapiens
gtgggttcacaatctccaggccctgg

SEQ ID NO: 25716 - DNA, 26 bp, Homo sapiens
tgggttcacaatctccaggccctgga

SEQ ID NO: 25717 - DNA, 26 bp, Homo sapiens
gggttcacaatctccaggccctggag

SEQ ID NO: 25718 - DNA, 26 bp, Homo sapiens
ggttcacaatctccaggccctggagt

SEQ ID NO: 25719 - DNA, 26 bp, Homo sapiens
gttcacaatctccaggccctggagtg

SEQ ID NO: 25720 - DNA, 26 bp, Homo sapiens
ttcacaatctccaggccctggagtgg

SEQ ID NO: 25721 - DNA, 26 bp, Homo sapiens
tcacaatctccaggccctggagtggg

SEQ ID NO: 25722 - DNA, 26 bp, Homo sapiens
cacaatctccaggccctggagtgggg

SEQ ID NO: 25723 - DNA, 26 bp, Homo sapiens
acaatctccaggccctggagtggggt

SEQ ID NO: 25724 - DNA, 26 bp, Homo sapiens
caatctccaggccctggagtggggtg

SEQ ID NO: 25725 - DNA, 26 bp, Homo sapiens
aatctccaggccctggagtggggtga

SEQ ID NO: 25726 - DNA, 26 bp, Homo sapiens
atctccaggccctggagtggggtgaa

SEQ ID NO: 25727 - DNA, 26 bp, Homo sapiens
tctccaggccctggagtggggtgaag

SEQ ID NO: 25728 - DNA, 26 bp, Homo sapiens
ctccaggccctggagtggggtgaagg

SEQ ID NO: 25729 - DNA, 26 bp, Homo sapiens
tccaggccctggagtggggtgaaggc

SEQ ID NO: 25730 - DNA, 26 bp, Homo sapiens
ccaggccctggagtggggtgaaggcc

SEQ ID NO: 25731 - DNA, 26 bp, Homo sapiens
caggccctggagtggggtgaaggcca

SEQ ID NO: 25732 - DNA, 26 bp, Homo sapiens
aggccctggagtggggtgaaggccac

SEQ ID NO: 25733 - DNA, 26 bp, Homo sapiens
ggccctggagtggggtgaaggccacg

SEQ ID NO: 25734 - DNA, 26 bp, Homo sapiens
gccctggagtggggtgaaggccacgc

SEQ ID NO: 25735 - DNA, 26 bp, Homo sapiens
ccctggagtggggtgaaggccacgct

SEQ ID NO: 25736 - DNA, 26 bp, Homo sapiens
cctggagtggggtgaaggccacgctg

SEQ ID NO: 25737 - DNA, 26 bp, Homo sapiens
ctggagtggggtgaaggccacgctgg

SEQ ID NO: 25738 - DNA, 26 bp, Homo sapiens
tggagtggggtgaaggccacgctgga

SEQ ID NO: 25739 - DNA, 26 bp, Homo sapiens
ggagtggggtgaaggccacgctggag

SEQ ID NO: 25740 - DNA, 26 bp, Homo sapiens
gagtggggtgaaggccacgctggagg

SEQ ID NO: 25741 - DNA, 26 bp, Homo sapiens
agtggggtgaaggccacgctggaggc

SEQ ID NO: 25742 - DNA, 26 bp, Homo sapiens
gtggggtgaaggccacgctggaggcc

SEQ ID NO: 25743 - DNA, 26 bp, Homo sapiens
tggggtgaaggccacgctggaggccg

SEQ ID NO: 25744 - DNA, 26 bp, Homo sapiens
ggggtgaaggccacgctggaggccgt

SEQ ID NO: 25745 - DNA, 26 bp, Homo sapiens
gggtgaaggccacgctggaggccgtg

SEQ ID NO: 25746 - DNA, 26 bp, Homo sapiens
ggtgaaggccacgctggaggccgtgc

SEQ ID NO: 25747 - DNA, 26 bp, Homo sapiens
gtgaaggccacgctggaggccgtgcc

SEQ ID NO: 25748 - DNA, 26 bp, Homo sapiens
tgaaggccacgctggaggccgtgccc

SEQ ID NO: 25749 - DNA, 26 bp, Homo sapiens
gaaggccacgctggaggccgtgcccg

SEQ ID NO: 25750 - DNA, 26 bp, Homo sapiens
aaggccacgctggaggccgtgcccga

SEQ ID NO: 25751 - DNA, 26 bp, Homo sapiens
aggccacgctggaggccgtgcccgag

SEQ ID NO: 25752 - DNA, 26 bp, Homo sapiens
ggccacgctggaggccgtgcccgagg

SEQ ID NO: 25753 - DNA, 26 bp, Homo sapiens
gccacgctggaggccgtgcccgagga

SEQ ID NO: 25754 - DNA, 26 bp, Homo sapiens
ccacgctggaggccgtgcccgaggag

SEQ ID NO: 25755 - DNA, 26 bp, Homo sapiens
cacgctggaggccgtgcccgaggagc

SEQ ID NO: 25756 - DNA, 26 bp, Homo sapiens
acgctggaggccgtgcccgaggagcg

SEQ ID NO: 25757 - DNA, 26 bp, Homo sapiens
cgctggaggccgtgcccgaggagcgg

SEQ ID NO: 25758 - DNA, 26 bp, Homo sapiens
gctggaggccgtgcccgaggagcggt

SEQ ID NO: 25759 - DNA, 26 bp, Homo sapiens
ctggaggccgtgcccgaggagcggtc

SEQ ID NO: 25760 - DNA, 26 bp, Homo sapiens
tggaggccgtgcccgaggagcggtcg

SEQ ID NO: 25761 - DNA, 26 bp, Homo sapiens
ggaggccgtgcccgaggagcggtcgc

SEQ ID NO: 25762 - DNA, 26 bp, Homo sapiens
gaggccgtgcccgaggagcggtcgcg

SEQ ID NO: 25763 - DNA, 26 bp, Homo sapiens
aggccgtgcccgaggagcggtcgcgg

SEQ ID NO: 25764 - DNA, 26 bp, Homo sapiens
ggccgtgcccgaggagcggtcgcgga

SEQ ID NO: 25765 - DNA, 26 bp, Homo sapiens
gccgtgcccgaggagcggtcgcggat

SEQ ID NO: 25766 - DNA, 26 bp, Homo sapiens
ccgtgcccgaggagcggtcgcggatg

SEQ ID NO: 25767 - DNA, 26 bp, Homo sapiens
cgtgcccgaggagcggtcgcggatgg

SEQ ID NO: 25768 - DNA, 26 bp, Homo sapiens
gtgcccgaggagcggtcgcggatggt

SEQ ID NO: 25769 - DNA, 26 bp, Homo sapiens
tgcccgaggagcggtcgcggatggtg

SEQ ID NO: 25770 - DNA, 26 bp, Homo sapiens
gcccgaggagcggtcgcggatggtgg

SEQ ID NO: 25771 - DNA, 26 bp, Homo sapiens
cccgaggagcggtcgcggatggtgga

SEQ ID NO: 25772 - DNA, 26 bp, Homo sapiens
ccgaggagcggtcgcggatggtggac

SEQ ID NO: 25773 - DNA, 26 bp, Homo sapiens
cgaggagcggtcgcggatggtggact

SEQ ID NO: 25774 - DNA, 26 bp, Homo sapiens
gaggagcggtcgcggatggtggactt

SEQ ID NO: 25775 - DNA, 26 bp, Homo sapiens
aggagcggtcgcggatggtggacttc

SEQ ID NO: 25776 - DNA, 26 bp, Homo sapiens
ggagcggtcgcggatggtggacttcc

SEQ ID NO: 25777 - DNA, 26 bp, Homo sapiens
gagcggtcgcggatggtggacttccc

SEQ ID NO: 25778 - DNA, 26 bp, Homo sapiens
agcggtcgcggatggtggacttcccg

SEQ ID NO: 25779 - DNA, 26 bp, Homo sapiens
gcggtcgcggatggtggacttcccgc

SEQ ID NO: 25780 - DNA, 26 bp, Homo sapiens
cggtcgcggatggtggacttcccgcc

SEQ ID NO: 25781 - DNA, 26 bp, Homo sapiens
ggtcgcggatggtggacttcccgcca

SEQ ID NO: 25782 - DNA, 26 bp, Homo sapiens
gtcgcggatggtggacttcccgccat

SEQ ID NO: 25783 - DNA, 26 bp, Homo sapiens
tcgcggatggtggacttcccgccata

SEQ ID NO: 25784 - DNA, 26 bp, Homo sapiens
cgcggatggtggacttcccgccatat

SEQ ID NO: 25785 - DNA, 26 bp, Homo sapiens
gcggatggtggacttcccgccatata

SEQ ID NO: 25786 - DNA, 26 bp, Homo sapiens
cggatggtggacttcccgccatatac

SEQ ID NO: 25787 - DNA, 26 bp, Homo sapiens
ggatggtggacttcccgccatatacg

SEQ ID NO: 25788 - DNA, 26 bp, Homo sapiens
gatggtggacttcccgccatatacga

SEQ ID NO: 25789 - DNA, 26 bp, Homo sapiens
atggtggacttcccgccatatacgac

SEQ ID NO: 25790 - DNA, 26 bp, Homo sapiens
tggtggacttcccgccatatacgacg

SEQ ID NO: 25791 - DNA, 26 bp, Homo sapiens
ggtggacttcccgccatatacgacgc

SEQ ID NO: 25792 - DNA, 26 bp, Homo sapiens
gtggacttcccgccatatacgacgct

SEQ ID NO: 25793 - DNA, 26 bp, Homo sapiens
tggacttcccgccatatacgacgctc

SEQ ID NO: 25794 - DNA, 26 bp, Homo sapiens
ggacttcccgccatatacgacgctct

SEQ ID NO: 25795 - DNA, 26 bp, Homo sapiens
gacttcccgccatatacgacgctctg

SEQ ID NO: 25796 - DNA, 26 bp, Homo sapiens
acttcccgccatatacgacgctctgc

SEQ ID NO: 25797 - DNA, 26 bp, Homo sapiens
cttcccgccatatacgacgctctgct

SEQ ID NO: 25798 - DNA, 26 bp, Homo sapiens
ttcccgccatatacgacgctctgctt

SEQ ID NO: 25799 - DNA, 26 bp, Homo sapiens
tcccgccatatacgacgctctgcttc

SEQ ID NO: 25800 - DNA, 26 bp, Homo sapiens
cccgccatatacgacgctctgcttct

SEQ ID NO: 25801 - DNA, 26 bp, Homo sapiens
ccgccatatacgacgctctgcttctg

SEQ ID NO: 25802 - DNA, 26 bp, Homo sapiens
cgccatatacgacgctctgcttctgc

SEQ ID NO: 25803 - DNA, 26 bp, Homo sapiens
gccatatacgacgctctgcttctgca

SEQ ID NO: 25804 - DNA, 26 bp, Homo sapiens
ccatatacgacgctctgcttctgcag

SEQ ID NO: 25805 - DNA, 26 bp, Homo sapiens
catatacgacgctctgcttctgcagg

SEQ ID NO: 25806 - DNA, 26 bp, Homo sapiens
atatacgacgctctgcttctgcaggg

SEQ ID NO: 25807 - DNA, 26 bp, Homo sapiens
tatacgacgctctgcttctgcagggt

SEQ ID NO: 25808 - DNA, 26 bp, Homo sapiens
atacgacgctctgcttctgcagggtc

SEQ ID NO: 25809 - DNA, 26 bp, Homo sapiens
tacgacgctctgcttctgcagggtcc

SEQ ID NO: 25810 - DNA, 26 bp, Homo sapiens
acgacgctctgcttctgcagggtccg

SEQ ID NO: 25811 - DNA, 26 bp, Homo sapiens
cgacgctctgcttctgcagggtccgc

SEQ ID NO: 25812 - DNA, 26 bp, Homo sapiens
gacgctctgcttctgcagggtccgct

SEQ ID NO: 25813 - DNA, 26 bp, Homo sapiens
acgctctgcttctgcagggtccgctg

SEQ ID NO: 25814 - DNA, 26 bp, Homo sapiens
cgctctgcttctgcagggtccgctgc

SEQ ID NO: 25815 - DNA, 26 bp, Homo sapiens
gctctgcttctgcagggtccgctgca

SEQ ID NO: 25816 - DNA, 26 bp, Homo sapiens
ctctgcttctgcagggtccgctgcag

SEQ ID NO: 25817 - DNA, 26 bp, Homo sapiens
tctgcttctgcagggtccgctgcagc

SEQ ID NO: 25818 - DNA, 26 bp, Homo sapiens
ctgcttctgcagggtccgctgcagcg

SEQ ID NO: 25819 - DNA, 26 bp, Homo sapiens
tgcttctgcagggtccgctgcagcgt

SEQ ID NO: 25820 - DNA, 26 bp, Homo sapiens
gcttctgcagggtccgctgcagcgtc

SEQ ID NO: 25821 - DNA, 26 bp, Homo sapiens
cttctgcagggtccgctgcagcgtct

SEQ ID NO: 25822 - DNA, 26 bp, Homo sapiens
ttctgcagggtccgctgcagcgtctt

SEQ ID NO: 25823 - DNA, 26 bp, Homo sapiens
tctgcagggtccgctgcagcgtcttg

SEQ ID NO: 25824 - DNA, 26 bp, Homo sapiens
ctgcagggtccgctgcagcgtcttgg

SEQ ID NO: 25825 - DNA, 26 bp, Homo sapiens
tgcagggtccgctgcagcgtcttgga

SEQ ID NO: 25826 - DNA, 26 bp, Homo sapiens
gcagggtccgctgcagcgtcttggag

SEQ ID NO: 25827 - DNA, 26 bp, Homo sapiens
cagggtccgctgcagcgtcttggaga

SEQ ID NO: 25828 - DNA, 26 bp, Homo sapiens
agggtccgctgcagcgtcttggagat

SEQ ID NO: 25829 - DNA, 26 bp, Homo sapiens
gggtccgctgcagcgtcttggagatc

SEQ ID NO: 25830 - DNA, 26 bp, Homo sapiens
ggtccgctgcagcgtcttggagatcc

SEQ ID NO: 25831 - DNA, 26 bp, Homo sapiens
gtccgctgcagcgtcttggagatcct

SEQ ID NO: 25832 - DNA, 26 bp, Homo sapiens
tccgctgcagcgtcttggagatcctg

SEQ ID NO: 25833 - DNA, 26 bp, Homo sapiens
ccgctgcagcgtcttggagatcctgg

SEQ ID NO: 25834 - DNA, 26 bp, Homo sapiens
cgctgcagcgtcttggagatcctggc

SEQ ID NO: 25835 - DNA, 26 bp, Homo sapiens
gctgcagcgtcttggagatcctggcc

SEQ ID NO: 25836 - DNA, 26 bp, Homo sapiens
ctgcagcgtcttggagatcctggcct

SEQ ID NO: 25837 - DNA, 26 bp, Homo sapiens
tgcagcgtcttggagatcctggcctt

SEQ ID NO: 25838 - DNA, 26 bp, Homo sapiens
gcagcgtcttggagatcctggccttg

SEQ ID NO: 25839 - DNA, 26 bp, Homo sapiens
cagcgtcttggagatcctggccttgg

SEQ ID NO: 25840 - DNA, 26 bp, Homo sapiens
agcgtcttggagatcctggccttggt

SEQ ID NO: 25841 - DNA, 26 bp, Homo sapiens
gcgtcttggagatcctggccttggtg

SEQ ID NO: 25842 - DNA, 26 bp, Homo sapiens
cgtcttggagatcctggccttggtgg

SEQ ID NO: 25843 - DNA, 26 bp, Homo sapiens
gtcttggagatcctggccttggtggc

SEQ ID NO: 25844 - DNA, 26 bp, Homo sapiens
tcttggagatcctggccttggtggcc

SEQ ID NO: 25845 - DNA, 26 bp, Homo sapiens
cttggagatcctggccttggtggcct

SEQ ID NO: 25846 - DNA, 26 bp, Homo sapiens
ttggagatcctggccttggtggcctc

SEQ ID NO: 25847 - DNA, 26 bp, Homo sapiens
tggagatcctggccttggtggcctcg

SEQ ID NO: 25848 - DNA, 26 bp, Homo sapiens
ggagatcctggccttggtggcctcgt

SEQ ID NO: 25849 - DNA, 26 bp, Homo sapiens
gagatcctggccttggtggcctcgtt

SEQ ID NO: 25850 - DNA, 26 bp, Homo sapiens
agatcctggccttggtggcctcgttt

SEQ ID NO: 25851 - DNA, 26 bp, Homo sapiens
gatcctggccttggtggcctcgttta

SEQ ID NO: 25852 - DNA, 26 bp, Homo sapiens
atcctggccttggtggcctcgtttac

SEQ ID NO: 25853 - DNA, 26 bp, Homo sapiens
tcctggccttggtggcctcgtttacc

SEQ ID NO: 25854 - DNA, 26 bp, Homo sapiens
cctggccttggtggcctcgtttacct

SEQ ID NO: 25855 - DNA, 26 bp, Homo sapiens
ctggccttggtggcctcgtttacctg

SEQ ID NO: 25856 - DNA, 26 bp, Homo sapiens
tggccttggtggcctcgtttacctgt

SEQ ID NO: 25857 - DNA, 26 bp, Homo sapiens
ggccttggtggcctcgtttacctgtg

SEQ ID NO: 25858 - DNA, 26 bp, Homo sapiens
gccttggtggcctcgtttacctgtgt

SEQ ID NO: 25859 - DNA, 26 bp, Homo sapiens
ccttggtggcctcgtttacctgtgtc

SEQ ID NO: 25860 - DNA, 26 bp, Homo sapiens
cttggtggcctcgtttacctgtgtct

SEQ ID NO: 25861 - DNA, 26 bp, Homo sapiens
ttggtggcctcgtttacctgtgtctg

SEQ ID NO: 25862 - DNA, 26 bp, Homo sapiens
tggtggcctcgtttacctgtgtctgc

SEQ ID NO: 25863 - DNA, 26 bp, Homo sapiens
ggtggcctcgtttacctgtgtctgcc

SEQ ID NO: 25864 - DNA, 26 bp, Homo sapiens
gtggcctcgtttacctgtgtctgccg

SEQ ID NO: 25865 - DNA, 26 bp, Homo sapiens
tggcctcgtttacctgtgtctgccgc

SEQ ID NO: 25866 - DNA, 26 bp, Homo sapiens
ggcctcgtttacctgtgtctgccgca

SEQ ID NO: 25867 - DNA, 26 bp, Homo sapiens
gcctcgtttacctgtgtctgccgcac

SEQ ID NO: 25868 - DNA, 26 bp, Homo sapiens
cctcgtttacctgtgtctgccgcaca

SEQ ID NO: 25869 - DNA, 26 bp, Homo sapiens
ctcgtttacctgtgtctgccgcacac

SEQ ID NO: 25870 - DNA, 26 bp, Homo sapiens
tcgtttacctgtgtctgccgcacacg

SEQ ID NO: 25871 - DNA, 26 bp, Homo sapiens
cgtttacctgtgtctgccgcacacgc

SEQ ID NO: 25872 - DNA, 26 bp, Homo sapiens
gtttacctgtgtctgccgcacacgcc

SEQ ID NO: 25873 - DNA, 26 bp, Homo sapiens
tttacctgtgtctgccgcacacgccc

SEQ ID NO: 25874 - DNA, 26 bp, Homo sapiens
ttacctgtgtctgccgcacacgccca

SEQ ID NO: 25875 - DNA, 26 bp, Homo sapiens
tacctgtgtctgccgcacacgcccac

SEQ ID NO: 25876 - DNA, 26 bp, Homo sapiens
acctgtgtctgccgcacacgcccact

SEQ ID NO: 25877 - DNA, 26 bp, Homo sapiens
cctgtgtctgccgcacacgcccactg

SEQ ID NO: 25878 - DNA, 26 bp, Homo sapiens
ctgtgtctgccgcacacgcccactgc

SEQ ID NO: 25879 - DNA, 26 bp, Homo sapiens
tgtgtctgccgcacacgcccactgcc

SEQ ID NO: 25880 - DNA, 26 bp, Homo sapiens
gtgtctgccgcacacgcccactgccc

SEQ ID NO: 25881 - DNA, 26 bp, Homo sapiens
tgtctgccgcacacgcccactgcccg

SEQ ID NO: 25882 - DNA, 26 bp, Homo sapiens
gtctgccgcacacgcccactgcccga

SEQ ID NO: 25883 - DNA, 26 bp, Homo sapiens
tctgccgcacacgcccactgcccgac

SEQ ID NO: 25884 - DNA, 26 bp, Homo sapiens
ctgccgcacacgcccactgcccgact

SEQ ID NO: 25885 - DNA, 26 bp, Homo sapiens
tgccgcacacgcccactgcccgactt

SEQ ID NO: 25886 - DNA, 26 bp, Homo sapiens
gccgcacacgcccactgcccgacttg

SEQ ID NO: 25887 - DNA, 26 bp, Homo sapiens
ccgcacacgcccactgcccgacttgc

SEQ ID NO: 25888 - DNA, 26 bp, Homo sapiens
cgcacacgcccactgcccgacttgcc

SEQ ID NO: 25889 - DNA, 26 bp, Homo sapiens
gcacacgcccactgcccgacttgccc

SEQ ID NO: 25890 - DNA, 26 bp, Homo sapiens
cacacgcccactgcccgacttgccca

SEQ ID NO: 25891 - DNA, 26 bp, Homo sapiens
acacgcccactgcccgacttgcccag

SEQ ID NO: 25892 - DNA, 26 bp, Homo sapiens
cacgcccactgcccgacttgcccagg

SEQ ID NO: 25893 - DNA, 26 bp, Homo sapiens
acgcccactgcccgacttgcccaggt

SEQ ID NO: 25894 - DNA, 26 bp, Homo sapiens
cgcccactgcccgacttgcccaggtg

SEQ ID NO: 25895 - DNA, 26 bp, Homo sapiens
gcccactgcccgacttgcccaggtgg

SEQ ID NO: 25896 - DNA, 26 bp, Homo sapiens
cccactgcccgacttgcccaggtggc

SEQ ID NO: 25897 - DNA, 26 bp, Homo sapiens
ccactgcccgacttgcccaggtggcc

SEQ ID NO: 25898 - DNA, 26 bp, Homo sapiens
cactgcccgacttgcccaggtggccc

SEQ ID NO: 25899 - DNA, 26 bp, Homo sapiens
actgcccgacttgcccaggtggccca

SEQ ID NO: 25900 - DNA, 26 bp, Homo sapiens
ctgcccgacttgcccaggtggcccag

SEQ ID NO: 25901 - DNA, 26 bp, Homo sapiens
tgcccgacttgcccaggtggcccagg

SEQ ID NO: 25902 - DNA, 26 bp, Homo sapiens
gcccgacttgcccaggtggcccaggc

SEQ ID NO: 25903 - DNA, 26 bp, Homo sapiens
cccgacttgcccaggtggcccaggct

SEQ ID NO: 25904 - DNA, 26 bp, Homo sapiens
ccgacttgcccaggtggcccaggctg

SEQ ID NO: 25905 - DNA, 26 bp, Homo sapiens
cgacttgcccaggtggcccaggctga

SEQ ID NO: 25906 - DNA, 26 bp, Homo sapiens
gacttgcccaggtggcccaggctgaa

SEQ ID NO: 25907 - DNA, 26 bp, Homo sapiens
acttgcccaggtggcccaggctgaat

SEQ ID NO: 25908 - DNA, 26 bp, Homo sapiens
cttgcccaggtggcccaggctgaatc

SEQ ID NO: 25909 - DNA, 26 bp, Homo sapiens
ttgcccaggtggcccaggctgaatcc

SEQ ID NO: 25910 - DNA, 26 bp, Homo sapiens
tgcccaggtggcccaggctgaatccc

SEQ ID NO: 25911 - DNA, 26 bp, Homo sapiens
gcccaggtggcccaggctgaatccca

SEQ ID NO: 25912 - DNA, 26 bp, Homo sapiens
cccaggtggcccaggctgaatcccag

SEQ ID NO: 25913 - DNA, 26 bp, Homo sapiens
ccaggtggcccaggctgaatcccagg

SEQ ID NO: 25914 - DNA, 26 bp, Homo sapiens
caggtggcccaggctgaatcccaggt

SEQ ID NO: 25915 - DNA, 26 bp, Homo sapiens
aggtggcccaggctgaatcccaggtc

SEQ ID NO: 25916 - DNA, 26 bp, Homo sapiens
ggtggcccaggctgaatcccaggtcc

SEQ ID NO: 25917 - DNA, 26 bp, Homo sapiens
gtggcccaggctgaatcccaggtcct

SEQ ID NO: 25918 - DNA, 26 bp, Homo sapiens
tggcccaggctgaatcccaggtcctc

SEQ ID NO: 25919 - DNA, 26 bp, Homo sapiens
ggcccaggctgaatcccaggtcctcc

SEQ ID NO: 25920 - DNA, 26 bp, Homo sapiens
gcccaggctgaatcccaggtcctcct

SEQ ID NO: 25921 - DNA, 26 bp, Homo sapiens
cccaggctgaatcccaggtcctcctg

SEQ ID NO: 25922 - DNA, 26 bp, Homo sapiens
ccaggctgaatcccaggtcctcctgg

SEQ ID NO: 25923 - DNA, 26 bp, Homo sapiens
caggctgaatcccaggtcctcctggt

SEQ ID NO: 25924 - DNA, 26 bp, Homo sapiens
aggctgaatcccaggtcctcctggta

SEQ ID NO: 25925 - DNA, 26 bp, Homo sapiens
ggctgaatcccaggtcctcctggtag

SEQ ID NO: 25926 - DNA, 26 bp, Homo sapiens
gctgaatcccaggtcctcctggtagg

SEQ ID NO: 25927 - DNA, 26 bp, Homo sapiens
ctgaatcccaggtcctcctggtaggc

SEQ ID NO: 25928 - DNA, 26 bp, Homo sapiens
tgaatcccaggtcctcctggtaggcg

SEQ ID NO: 25929 - DNA, 26 bp, Homo sapiens
gaatcccaggtcctcctggtaggcgt

SEQ ID NO: 25930 - DNA, 26 bp, Homo sapiens
aatcccaggtcctcctggtaggcgtc

SEQ ID NO: 25931 - DNA, 26 bp, Homo sapiens
atcccaggtcctcctggtaggcgtcc

SEQ ID NO: 25932 - DNA, 26 bp, Homo sapiens
tcccaggtcctcctggtaggcgtcct

SEQ ID NO: 25933 - DNA, 26 bp, Homo sapiens
cccaggtcctcctggtaggcgtcctc

SEQ ID NO: 25934 - DNA, 26 bp, Homo sapiens
ccaggtcctcctggtaggcgtcctcc

SEQ ID NO: 25935 - DNA, 26 bp, Homo sapiens
caggtcctcctggtaggcgtcctcct

SEQ ID NO: 25936 - DNA, 26 bp, Homo sapiens
aggtcctcctggtaggcgtcctcctc

SEQ ID NO: 25937 - DNA, 26 bp, Homo sapiens
ggtcctcctggtaggcgtcctcctcg

SEQ ID NO: 25938 - DNA, 26 bp, Homo sapiens
gtcctcctggtaggcgtcctcctcga

SEQ ID NO: 25939 - DNA, 26 bp, Homo sapiens
tcctcctggtaggcgtcctcctcgat

SEQ ID NO: 25940 - DNA, 26 bp, Homo sapiens
cctcctggtaggcgtcctcctcgatc

SEQ ID NO: 25941 - DNA, 26 bp, Homo sapiens
ctcctggtaggcgtcctcctcgatct

SEQ ID NO: 25942 - DNA, 26 bp, Homo sapiens
tcctggtaggcgtcctcctcgatctc

SEQ ID NO: 25943 - DNA, 26 bp, Homo sapiens
cctggtaggcgtcctcctcgatctct

SEQ ID NO: 25944 - DNA, 26 bp, Homo sapiens
ctggtaggcgtcctcctcgatctctc

SEQ ID NO: 25945 - DNA, 26 bp, Homo sapiens
tggtaggcgtcctcctcgatctctcc

SEQ ID NO: 25946 - DNA, 26 bp, Homo sapiens
ggtaggcgtcctcctcgatctctccg

SEQ ID NO: 25947 - DNA, 26 bp, Homo sapiens
gtaggcgtcctcctcgatctctccga

SEQ ID NO: 25948 - DNA, 26 bp, Homo sapiens
taggcgtcctcctcgatctctccgaa

SEQ ID NO: 25949 - DNA, 26 bp, Homo sapiens
aggcgtcctcctcgatctctccgaag

SEQ ID NO: 25950 - DNA, 26 bp, Homo sapiens
ggcgtcctcctcgatctctccgaagc

SEQ ID NO: 25951 - DNA, 26 bp, Homo sapiens
gcgtcctcctcgatctctccgaagct

SEQ ID NO: 25952 - DNA, 26 bp, Homo sapiens
cgtcctcctcgatctctccgaagctc

SEQ ID NO: 25953 - DNA, 26 bp, Homo sapiens
gtcctcctcgatctctccgaagctca

SEQ ID NO: 25954 - DNA, 26 bp, Homo sapiens
tcctcctcgatctctccgaagctcat

SEQ ID NO: 25955 - DNA, 26 bp, Homo sapiens
cctcctcgatctctccgaagctcata

SEQ ID NO: 25956 - DNA, 26 bp, Homo sapiens
ctcctcgatctctccgaagctcatac

SEQ ID NO: 25957 - DNA, 26 bp, Homo sapiens
tcctcgatctctccgaagctcatacg

SEQ ID NO: 25958 - DNA, 26 bp, Homo sapiens
cctcgatctctccgaagctcatacgg

SEQ ID NO: 25959 - DNA, 26 bp, Homo sapiens
ctcgatctctccgaagctcatacggt

SEQ ID NO: 25960 - DNA, 26 bp, Homo sapiens
tcgatctctccgaagctcatacggtt

SEQ ID NO: 25961 - DNA, 26 bp, Homo sapiens
cgatctctccgaagctcatacggttg

SEQ ID NO: 25962 - DNA, 26 bp, Homo sapiens
gatctctccgaagctcatacggttgg

SEQ ID NO: 25963 - DNA, 26 bp, Homo sapiens
atctctccgaagctcatacggttggc

SEQ ID NO: 25964 - DNA, 26 bp, Homo sapiens
tctctccgaagctcatacggttggcc

SEQ ID NO: 25965 - DNA, 26 bp, Homo sapiens
ctctccgaagctcatacggttggcct

SEQ ID NO: 25966 - DNA, 26 bp, Homo sapiens
tctccgaagctcatacggttggcctg

SEQ ID NO: 25967 - DNA, 26 bp, Homo sapiens
ctccgaagctcatacggttggcctgc

SEQ ID NO: 25968 - DNA, 26 bp, Homo sapiens
tccgaagctcatacggttggcctgct

SEQ ID NO: 25969 - DNA, 26 bp, Homo sapiens
ccgaagctcatacggttggcctgctt

SEQ ID NO: 25970 - DNA, 26 bp, Homo sapiens
cgaagctcatacggttggcctgcttc

SEQ ID NO: 25971 - DNA, 26 bp, Homo sapiens
gaagctcatacggttggcctgcttcc

SEQ ID NO: 25972 - DNA, 26 bp, Homo sapiens
aagctcatacggttggcctgcttccg

SEQ ID NO: 25973 - DNA, 26 bp, Homo sapiens
agctcatacggttggcctgcttccgg

SEQ ID NO: 25974 - DNA, 26 bp, Homo sapiens
gctcatacggttggcctgcttccgga

SEQ ID NO: 25975 - DNA, 26 bp, Homo sapiens
ctcatacggttggcctgcttccggat

SEQ ID NO: 25976 - DNA, 26 bp, Homo sapiens
tcatacggttggcctgcttccggatc

SEQ ID NO: 25977 - DNA, 26 bp, Homo sapiens
catacggttggcctgcttccggatct

SEQ ID NO: 25978 - DNA, 26 bp, Homo sapiens
atacggttggcctgcttccggatctc

SEQ ID NO: 25979 - DNA, 26 bp, Homo sapiens
tacggttggcctgcttccggatctcc

SEQ ID NO: 25980 - DNA, 26 bp, Homo sapiens
acggttggcctgcttccggatctccg

SEQ ID NO: 25981 - DNA, 26 bp, Homo sapiens
cggttggcctgcttccggatctccgt

SEQ ID NO: 25982 - DNA, 26 bp, Homo sapiens
ggttggcctgcttccggatctccgtc

SEQ ID NO: 25983 - DNA, 26 bp, Homo sapiens
gttggcctgcttccggatctccgtca

SEQ ID NO: 25984 - DNA, 26 bp, Homo sapiens
ttggcctgcttccggatctccgtcag

SEQ ID NO: 25985 - DNA, 26 bp, Homo sapiens
tggcctgcttccggatctccgtcagc

SEQ ID NO: 25986 - DNA, 26 bp, Homo sapiens
ggcctgcttccggatctccgtcagcc

SEQ ID NO: 25987 - DNA, 26 bp, Homo sapiens
gcctgcttccggatctccgtcagccc

SEQ ID NO: 25988 - DNA, 26 bp, Homo sapiens
cctgcttccggatctccgtcagcccc

SEQ ID NO: 25989 - DNA, 26 bp, Homo sapiens
ctgcttccggatctccgtcagcccca

SEQ ID NO: 25990 - DNA, 26 bp, Homo sapiens
tgcttccggatctccgtcagccccag

SEQ ID NO: 25991 - DNA, 26 bp, Homo sapiens
gcttccggatctccgtcagccccagc

SEQ ID NO: 25992 - DNA, 26 bp, Homo sapiens
cttccggatctccgtcagccccagcc

SEQ ID NO: 25993 - DNA, 26 bp, Homo sapiens
ttccggatctccgtcagccccagccg

SEQ ID NO: 25994 - DNA, 26 bp, Homo sapiens
tccggatctccgtcagccccagccgc

SEQ ID NO: 25995 - DNA, 26 bp, Homo sapiens
ccggatctccgtcagccccagccgct

SEQ ID NO: 25996 - DNA, 26 bp, Homo sapiens
cggatctccgtcagccccagccgctc

SEQ ID NO: 25997 - DNA, 26 bp, Homo sapiens
ggatctccgtcagccccagccgctcc

SEQ ID NO: 25998 - DNA, 26 bp, Homo sapiens
gatctccgtcagccccagccgctcct

SEQ ID NO: 25999 - DNA, 26 bp, Homo sapiens
atctccgtcagccccagccgctcctt

SEQ ID NO: 26000 - DNA, 26 bp, Homo sapiens
tctccgtcagccccagccgctccttc

SEQ ID NO: 26001 - DNA, 26 bp, Homo sapiens
ctccgtcagccccagccgctccttca

SEQ ID NO: 26002 - DNA, 26 bp, Homo sapiens
tccgtcagccccagccgctccttcat

SEQ ID NO: 26003 - DNA, 26 bp, Homo sapiens
ccgtcagccccagccgctccttcatc

SEQ ID NO: 26004 - DNA, 26 bp, Homo sapiens
cgtcagccccagccgctccttcatct

SEQ ID NO: 26005 - DNA, 26 bp, Homo sapiens
gtcagccccagccgctccttcatctt

SEQ ID NO: 26006 - DNA, 26 bp, Homo sapiens
tcagccccagccgctccttcatcttg

SEQ ID NO: 26007 - DNA, 26 bp, Homo sapiens
cagccccagccgctccttcatcttgc

SEQ ID NO: 26008 - DNA, 26 bp, Homo sapiens
agccccagccgctccttcatcttgcg

SEQ ID NO: 26009 - DNA, 26 bp, Homo sapiens
gccccagccgctccttcatcttgcgg

SEQ ID NO: 26010 - DNA, 26 bp, Homo sapiens
ccccagccgctccttcatcttgcggt

SEQ ID NO: 26011 - DNA, 26 bp, Homo sapiens
cccagccgctccttcatcttgcggta

SEQ ID NO: 26012 - DNA, 26 bp, Homo sapiens
ccagccgctccttcatcttgcggtac

SEQ ID NO: 26013 - DNA, 26 bp, Homo sapiens
cagccgctccttcatcttgcggtacc

SEQ ID NO: 26014 - DNA, 26 bp, Homo sapiens
agccgctccttcatcttgcggtacct

SEQ ID NO: 26015 - DNA, 26 bp, Homo sapiens
gccgctccttcatcttgcggtacctg

SEQ ID NO: 26016 - DNA, 26 bp, Homo sapiens
ccgctccttcatcttgcggtacctgc

SEQ ID NO: 26017 - DNA, 26 bp, Homo sapiens
cgctccttcatcttgcggtacctgcg

SEQ ID NO: 26018 - DNA, 26 bp, Homo sapiens
gctccttcatcttgcggtacctgcgg

SEQ ID NO: 26019 - DNA, 26 bp, Homo sapiens
ctccttcatcttgcggtacctgcggc

SEQ ID NO: 26020 - DNA, 26 bp, Homo sapiens
tccttcatcttgcggtacctgcggcc

SEQ ID NO: 26021 - DNA, 26 bp, Homo sapiens
ccttcatcttgcggtacctgcggccg

SEQ ID NO: 26022 - DNA, 26 bp, Homo sapiens
cttcatcttgcggtacctgcggccgc

SEQ ID NO: 26023 - DNA, 26 bp, Homo sapiens
ttcatcttgcggtacctgcggccgcc

SEQ ID NO: 26024 - DNA, 26 bp, Homo sapiens
tcatcttgcggtacctgcggccgcct

SEQ ID NO: 26025 - DNA, 26 bp, Homo sapiens
catcttgcggtacctgcggccgcctc

SEQ ID NO: 26026 - DNA, 26 bp, Homo sapiens
atcttgcggtacctgcggccgcctcg

SEQ ID NO: 26027 - DNA, 26 bp, Homo sapiens
tcttgcggtacctgcggccgcctcgc

SEQ ID NO: 26028 - DNA, 26 bp, Homo sapiens
cttgcggtacctgcggccgcctcgct

SEQ ID NO: 26029 - DNA, 26 bp, Homo sapiens
ttgcggtacctgcggccgcctcgctt

SEQ ID NO: 26030 - DNA, 26 bp, Homo sapiens
tgcggtacctgcggccgcctcgcttc

SEQ ID NO: 26031 - DNA, 26 bp, Homo sapiens
gcggtacctgcggccgcctcgcttct

SEQ ID NO: 26032 - DNA, 26 bp, Homo sapiens
cggtacctgcggccgcctcgcttctt

SEQ ID NO: 26033 - DNA, 26 bp, Homo sapiens
ggtacctgcggccgcctcgcttcttc

SEQ ID NO: 26034 - DNA, 26 bp, Homo sapiens
gtacctgcggccgcctcgcttcttcc

SEQ ID NO: 26035 - DNA, 26 bp, Homo sapiens
tacctgcggccgcctcgcttcttccg

SEQ ID NO: 26036 - DNA, 26 bp, Homo sapiens
acctgcggccgcctcgcttcttccgc

SEQ ID NO: 26037 - DNA, 26 bp, Homo sapiens
cctgcggccgcctcgcttcttccgct

SEQ ID NO: 26038 - DNA, 26 bp, Homo sapiens
ctgcggccgcctcgcttcttccgctg

SEQ ID NO: 26039 - DNA, 26 bp, Homo sapiens
tgcggccgcctcgcttcttccgctgt

SEQ ID NO: 26040 - DNA, 26 bp, Homo sapiens
gcggccgcctcgcttcttccgctgtc

SEQ ID NO: 26041 - DNA, 26 bp, Homo sapiens
cggccgcctcgcttcttccgctgtcc

SEQ ID NO: 26042 - DNA, 26 bp, Homo sapiens
ggccgcctcgcttcttccgctgtcca

SEQ ID NO: 26043 - DNA, 26 bp, Homo sapiens
gccgcctcgcttcttccgctgtccat

SEQ ID NO: 26044 - DNA, 26 bp, Homo sapiens
ccgcctcgcttcttccgctgtccatc

SEQ ID NO: 26045 - DNA, 26 bp, Homo sapiens
cgcctcgcttcttccgctgtccatcc

SEQ ID NO: 26046 - DNA, 26 bp, Homo sapiens
gcctcgcttcttccgctgtccatcca

SEQ ID NO: 26047 - DNA, 26 bp, Homo sapiens
cctcgcttcttccgctgtccatccag

SEQ ID NO: 26048 - DNA, 26 bp, Homo sapiens
ctcgcttcttccgctgtccatccagg

SEQ ID NO: 26049 - DNA, 26 bp, Homo sapiens
tcgcttcttccgctgtccatccaggg

SEQ ID NO: 26050 - DNA, 26 bp, Homo sapiens
cgcttcttccgctgtccatccagggg

SEQ ID NO: 26051 - DNA, 26 bp, Homo sapiens
gcttcttccgctgtccatccaggggc

SEQ ID NO: 26052 - DNA, 26 bp, Homo sapiens
cttcttccgctgtccatccaggggcg

SEQ ID NO: 26053 - DNA, 26 bp, Homo sapiens
ttcttccgctgtccatccaggggcgc

SEQ ID NO: 26054 - DNA, 26 bp, Homo sapiens
tcttccgctgtccatccaggggcgca

SEQ ID NO: 26055 - DNA, 26 bp, Homo sapiens
cttccgctgtccatccaggggcgcag

SEQ ID NO: 26056 - DNA, 26 bp, Homo sapiens
ttccgctgtccatccaggggcgcagg

SEQ ID NO: 26057 - DNA, 26 bp, Homo sapiens
tccgctgtccatccaggggcgcaggc

SEQ ID NO: 26058 - DNA, 26 bp, Homo sapiens
ccgctgtccatccaggggcgcaggca

SEQ ID NO: 26059 - DNA, 26 bp, Homo sapiens
cgctgtccatccaggggcgcaggcag

SEQ ID NO: 26060 - DNA, 26 bp, Homo sapiens
gctgtccatccaggggcgcaggcagc

SEQ ID NO: 26061 - DNA, 26 bp, Homo sapiens
ctgtccatccaggggcgcaggcagcg

SEQ ID NO: 26062 - DNA, 26 bp, Homo sapiens
tgtccatccaggggcgcaggcagcgg

SEQ ID NO: 26063 - DNA, 26 bp, Homo sapiens
gtccatccaggggcgcaggcagcggc

SEQ ID NO: 26064 - DNA, 26 bp, Homo sapiens
tccatccaggggcgcaggcagcggct

SEQ ID NO: 26065 - DNA, 26 bp, Homo sapiens
ccatccaggggcgcaggcagcggctt

SEQ ID NO: 26066 - DNA, 26 bp, Homo sapiens
catccaggggcgcaggcagcggcttc

SEQ ID NO: 26067 - DNA, 26 bp, Homo sapiens
atccaggggcgcaggcagcggcttca

SEQ ID NO: 26068 - DNA, 26 bp, Homo sapiens
tccaggggcgcaggcagcggcttcac

SEQ ID NO: 26069 - DNA, 26 bp, Homo sapiens
ccaggggcgcaggcagcggcttcacc

SEQ ID NO: 26070 - DNA, 26 bp, Homo sapiens
caggggcgcaggcagcggcttcacct

SEQ ID NO: 26071 - DNA, 26 bp, Homo sapiens
aggggcgcaggcagcggcttcacctg

SEQ ID NO: 26072 - DNA, 26 bp, Homo sapiens
ggggcgcaggcagcggcttcacctgc

SEQ ID NO: 26073 - DNA, 26 bp, Homo sapiens
gggcgcaggcagcggcttcacctgct

SEQ ID NO: 26074 - DNA, 26 bp, Homo sapiens
ggcgcaggcagcggcttcacctgctt

SEQ ID NO: 26075 - DNA, 26 bp, Homo sapiens
gcgcaggcagcggcttcacctgcttc

SEQ ID NO: 26076 - DNA, 26 bp, Homo sapiens
cgcaggcagcggcttcacctgcttca

SEQ ID NO: 26077 - DNA, 26 bp, Homo sapiens
gcaggcagcggcttcacctgcttcac

SEQ ID NO: 26078 - DNA, 26 bp, Homo sapiens
caggcagcggcttcacctgcttcaca

SEQ ID NO: 26079 - DNA, 26 bp, Homo sapiens
aggcagcggcttcacctgcttcacag

SEQ ID NO: 26080 - DNA, 26 bp, Homo sapiens
ggcagcggcttcacctgcttcacagg

SEQ ID NO: 26081 - DNA, 26 bp, Homo sapiens
gcagcggcttcacctgcttcacaggc

SEQ ID NO: 26082 - DNA, 26 bp, Homo sapiens
cagcggcttcacctgcttcacaggcg

SEQ ID NO: 26083 - DNA, 26 bp, Homo sapiens
agcggcttcacctgcttcacaggcgg

SEQ ID NO: 26084 - DNA, 26 bp, Homo sapiens
gcggcttcacctgcttcacaggcggc

SEQ ID NO: 26085 - DNA, 26 bp, Homo sapiens
cggcttcacctgcttcacaggcggcg

SEQ ID NO: 26086 - DNA, 26 bp, Homo sapiens
ggcttcacctgcttcacaggcggcgg

SEQ ID NO: 26087 - DNA, 26 bp, Homo sapiens
gcttcacctgcttcacaggcggcggc

SEQ ID NO: 26088 - DNA, 26 bp, Homo sapiens
cttcacctgcttcacaggcggcggct

SEQ ID NO: 26089 - DNA, 26 bp, Homo sapiens
ttcacctgcttcacaggcggcggctc

SEQ ID NO: 26090 - DNA, 26 bp, Homo sapiens
tcacctgcttcacaggcggcggctcc

SEQ ID NO: 26091 - DNA, 26 bp, Homo sapiens
cacctgcttcacaggcggcggctcct

SEQ ID NO: 26092 - DNA, 26 bp, Homo sapiens
acctgcttcacaggcggcggctcctg

SEQ ID NO: 26093 - DNA, 26 bp, Homo sapiens
cctgcttcacaggcggcggctcctgc

SEQ ID NO: 26094 - DNA, 26 bp, Homo sapiens
ctgcttcacaggcggcggctcctgcc

SEQ ID NO: 26095 - DNA, 26 bp, Homo sapiens
tgcttcacaggcggcggctcctgcca

SEQ ID NO: 26096 - DNA, 26 bp, Homo sapiens
gcttcacaggcggcggctcctgccac

SEQ ID NO: 26097 - DNA, 26 bp, Homo sapiens
cttcacaggcggcggctcctgccact

SEQ ID NO: 26098 - DNA, 26 bp, Homo sapiens
ttcacaggcggcggctcctgccactt

SEQ ID NO: 26099 - DNA, 26 bp, Homo sapiens
tcacaggcggcggctcctgccacttg

SEQ ID NO: 26100 - DNA, 26 bp, Homo sapiens
cacaggcggcggctcctgccacttgt

SEQ ID NO: 26101 - DNA, 26 bp, Homo sapiens
acaggcggcggctcctgccacttgtc

SEQ ID NO: 26102 - DNA, 26 bp, Homo sapiens
caggcggcggctcctgccacttgtcg

SEQ ID NO: 26103 - DNA, 26 bp, Homo sapiens
aggcggcggctcctgccacttgtcga

SEQ ID NO: 26104 - DNA, 26 bp, Homo sapiens
ggcggcggctcctgccacttgtcgaa

SEQ ID NO: 26105 - DNA, 26 bp, Homo sapiens
gcggcggctcctgccacttgtcgaat

SEQ ID NO: 26106 - DNA, 26 bp, Homo sapiens
cggcggctcctgccacttgtcgaatt

SEQ ID NO: 26107 - DNA, 26 bp, Homo sapiens
ggcggctcctgccacttgtcgaattt

SEQ ID NO: 26108 - DNA, 26 bp, Homo sapiens
gcggctcctgccacttgtcgaatttg

SEQ ID NO: 26109 - DNA, 26 bp, Homo sapiens
cggctcctgccacttgtcgaatttgc

SEQ ID NO: 26110 - DNA, 26 bp, Homo sapiens
ggctcctgccacttgtcgaatttgcg

SEQ ID NO: 26111 - DNA, 26 bp, Homo sapiens
gctcctgccacttgtcgaatttgcgc

SEQ ID NO: 26112 - DNA, 26 bp, Homo sapiens
ctcctgccacttgtcgaatttgcgct

SEQ ID NO: 26113 - DNA, 26 bp, Homo sapiens
tcctgccacttgtcgaatttgcgctc

SEQ ID NO: 26114 - DNA, 26 bp, Homo sapiens
cctgccacttgtcgaatttgcgctcg

SEQ ID NO: 26115 - DNA, 26 bp, Homo sapiens
ctgccacttgtcgaatttgcgctcga

SEQ ID NO: 26116 - DNA, 26 bp, Homo sapiens
tgccacttgtcgaatttgcgctcgat

SEQ ID NO: 26117 - DNA, 26 bp, Homo sapiens
gccacttgtcgaatttgcgctcgatc

SEQ ID NO: 26118 - DNA, 26 bp, Homo sapiens
ccacttgtcgaatttgcgctcgatct

SEQ ID NO: 26119 - DNA, 26 bp, Homo sapiens
cacttgtcgaatttgcgctcgatctc

SEQ ID NO: 26120 - DNA, 26 bp, Homo sapiens
acttgtcgaatttgcgctcgatctca

SEQ ID NO: 26121 - DNA, 26 bp, Homo sapiens
cttgtcgaatttgcgctcgatctcat

SEQ ID NO: 26122 - DNA, 26 bp, Homo sapiens
ttgtcgaatttgcgctcgatctcatc

SEQ ID NO: 26123 - DNA, 26 bp, Homo sapiens
tgtcgaatttgcgctcgatctcatcc

SEQ ID NO: 26124 - DNA, 26 bp, Homo sapiens
gtcgaatttgcgctcgatctcatcct

SEQ ID NO: 26125 - DNA, 26 bp, Homo sapiens
tcgaatttgcgctcgatctcatcctt

SEQ ID NO: 26126 - DNA, 26 bp, Homo sapiens
cgaatttgcgctcgatctcatccttc

SEQ ID NO: 26127 - DNA, 26 bp, Homo sapiens
gaatttgcgctcgatctcatccttca

SEQ ID NO: 26128 - DNA, 26 bp, Homo sapiens
aatttgcgctcgatctcatccttcag

SEQ ID NO: 26129 - DNA, 26 bp, Homo sapiens
atttgcgctcgatctcatccttcagt

SEQ ID NO: 26130 - DNA, 26 bp, Homo sapiens
tttgcgctcgatctcatccttcagtt

SEQ ID NO: 26131 - DNA, 26 bp, Homo sapiens
ttgcgctcgatctcatccttcagttc

SEQ ID NO: 26132 - DNA, 26 bp, Homo sapiens
tgcgctcgatctcatccttcagttcg

SEQ ID NO: 26133 - DNA, 26 bp, Homo sapiens
gcgctcgatctcatccttcagttcgt

SEQ ID NO: 26134 - DNA, 26 bp, Homo sapiens
cgctcgatctcatccttcagttcgta

SEQ ID NO: 26135 - DNA, 26 bp, Homo sapiens
gctcgatctcatccttcagttcgtag

SEQ ID NO: 26136 - DNA, 26 bp, Homo sapiens
ctcgatctcatccttcagttcgtagc

SEQ ID NO: 26137 - DNA, 26 bp, Homo sapiens
tcgatctcatccttcagttcgtagcc

SEQ ID NO: 26138 - DNA, 26 bp, Homo sapiens
cgatctcatccttcagttcgtagccc

SEQ ID NO: 26139 - DNA, 26 bp, Homo sapiens
gatctcatccttcagttcgtagccca

SEQ ID NO: 26140 - DNA, 26 bp, Homo sapiens
atctcatccttcagttcgtagcccac

SEQ ID NO: 26141 - DNA, 26 bp, Homo sapiens
tctcatccttcagttcgtagcccacc

SEQ ID NO: 26142 - DNA, 26 bp, Homo sapiens
ctcatccttcagttcgtagcccacct

SEQ ID NO: 26143 - DNA, 26 bp, Homo sapiens
tcatccttcagttcgtagcccacctt

SEQ ID NO: 26144 - DNA, 26 bp, Homo sapiens
catccttcagttcgtagcccaccttc

SEQ ID NO: 26145 - DNA, 26 bp, Homo sapiens
atccttcagttcgtagcccaccttcc

SEQ ID NO: 26146 - DNA, 26 bp, Homo sapiens
tccttcagttcgtagcccaccttccc

SEQ ID NO: 26147 - DNA, 26 bp, Homo sapiens
ccttcagttcgtagcccaccttccct

SEQ ID NO: 26148 - DNA, 26 bp, Homo sapiens
cttcagttcgtagcccaccttccctt

SEQ ID NO: 26149 - DNA, 26 bp, Homo sapiens
ttcagttcgtagcccaccttcccttc

SEQ ID NO: 26150 - DNA, 26 bp, Homo sapiens
tcagttcgtagcccaccttcccttct

SEQ ID NO: 26151 - DNA, 26 bp, Homo sapiens
cagttcgtagcccaccttcccttctg

SEQ ID NO: 26152 - DNA, 26 bp, Homo sapiens
agttcgtagcccaccttcccttctgt

SEQ ID NO: 26153 - DNA, 26 bp, Homo sapiens
gttcgtagcccaccttcccttctgtg

SEQ ID NO: 26154 - DNA, 26 bp, Homo sapiens
ttcgtagcccaccttcccttctgtgc

SEQ ID NO: 26155 - DNA, 26 bp, Homo sapiens
tcgtagcccaccttcccttctgtgct

SEQ ID NO: 26156 - DNA, 26 bp, Homo sapiens
cgtagcccaccttcccttctgtgctc

SEQ ID NO: 26157 - DNA, 26 bp, Homo sapiens
gtagcccaccttcccttctgtgctct

SEQ ID NO: 26158 - DNA, 26 bp, Homo sapiens
tagcccaccttcccttctgtgctctc

SEQ ID NO: 26159 - DNA, 26 bp, Homo sapiens
agcccaccttcccttctgtgctctcg

SEQ ID NO: 26160 - DNA, 26 bp, Homo sapiens
gcccaccttcccttctgtgctctcgt

SEQ ID NO: 26161 - DNA, 26 bp, Homo sapiens
cccaccttcccttctgtgctctcgtg

SEQ ID NO: 26162 - DNA, 26 bp, Homo sapiens
ccaccttcccttctgtgctctcgtgg

SEQ ID NO: 26163 - DNA, 26 bp, Homo sapiens
caccttcccttctgtgctctcgtgga

SEQ ID NO: 26164 - DNA, 26 bp, Homo sapiens
accttcccttctgtgctctcgtggaa

SEQ ID NO: 26165 - DNA, 26 bp, Homo sapiens
ccttcccttctgtgctctcgtggaaa

SEQ ID NO: 26166 - DNA, 26 bp, Homo sapiens
cttcccttctgtgctctcgtggaaac

SEQ ID NO: 26167 - DNA, 26 bp, Homo sapiens
ttcccttctgtgctctcgtggaaact

SEQ ID NO: 26168 - DNA, 26 bp, Homo sapiens
tcccttctgtgctctcgtggaaactg

SEQ ID NO: 26169 - DNA, 26 bp, Homo sapiens
cccttctgtgctctcgtggaaactgt

SEQ ID NO: 26170 - DNA, 26 bp, Homo sapiens
ccttctgtgctctcgtggaaactgtc

SEQ ID NO: 26171 - DNA, 26 bp, Homo sapiens
cttctgtgctctcgtggaaactgtcc

SEQ ID NO: 26172 - DNA, 26 bp, Homo sapiens
ttctgtgctctcgtggaaactgtcca

SEQ ID NO: 26173 - DNA, 26 bp, Homo sapiens
tctgtgctctcgtggaaactgtccac

SEQ ID NO: 26174 - DNA, 26 bp, Homo sapiens
ctgtgctctcgtggaaactgtccaca

SEQ ID NO: 26175 - DNA, 26 bp, Homo sapiens
tgtgctctcgtggaaactgtccacac

SEQ ID NO: 26176 - DNA, 26 bp, Homo sapiens
gtgctctcgtggaaactgtccacacg

SEQ ID NO: 26177 - DNA, 26 bp, Homo sapiens
tgctctcgtggaaactgtccacacgg

SEQ ID NO: 26178 - DNA, 26 bp, Homo sapiens
gctctcgtggaaactgtccacacggg

SEQ ID NO: 26179 - DNA, 26 bp, Homo sapiens
ctctcgtggaaactgtccacacgggc

SEQ ID NO: 26180 - DNA, 26 bp, Homo sapiens
tctcgtggaaactgtccacacgggct

SEQ ID NO: 26181 - DNA, 26 bp, Homo sapiens
ctcgtggaaactgtccacacgggctg

SEQ ID NO: 26182 - DNA, 26 bp, Homo sapiens
tcgtggaaactgtccacacgggctgc

SEQ ID NO: 26183 - DNA, 26 bp, Homo sapiens
cgtggaaactgtccacacgggctgcc

SEQ ID NO: 26184 - DNA, 26 bp, Homo sapiens
gtggaaactgtccacacgggctgcca

SEQ ID NO: 26185 - DNA, 26 bp, Homo sapiens
tggaaactgtccacacgggctgccag

SEQ ID NO: 26186 - DNA, 26 bp, Homo sapiens
ggaaactgtccacacgggctgccagt

SEQ ID NO: 26187 - DNA, 26 bp, Homo sapiens
gaaactgtccacacgggctgccagtg

SEQ ID NO: 26188 - DNA, 26 bp, Homo sapiens
aaactgtccacacgggctgccagtgt

SEQ ID NO: 26189 - DNA, 26 bp, Homo sapiens
aactgtccacacgggctgccagtgtg

SEQ ID NO: 26190 - DNA, 26 bp, Homo sapiens
actgtccacacgggctgccagtgtgc

SEQ ID NO: 26191 - DNA, 26 bp, Homo sapiens
ctgtccacacgggctgccagtgtgca

SEQ ID NO: 26192 - DNA, 26 bp, Homo sapiens
tgtccacacgggctgccagtgtgcac

SEQ ID NO: 26193 - DNA, 26 bp, Homo sapiens
gtccacacgggctgccagtgtgcact

SEQ ID NO: 26194 - DNA, 26 bp, Homo sapiens
tccacacgggctgccagtgtgcactt

SEQ ID NO: 26195 - DNA, 26 bp, Homo sapiens
ccacacgggctgccagtgtgcacttg

SEQ ID NO: 26196 - DNA, 26 bp, Homo sapiens
cacacgggctgccagtgtgcacttgg

SEQ ID NO: 26197 - DNA, 26 bp, Homo sapiens
acacgggctgccagtgtgcacttggc

SEQ ID NO: 26198 - DNA, 26 bp, Homo sapiens
cacgggctgccagtgtgcacttggcg

SEQ ID NO: 26199 - DNA, 26 bp, Homo sapiens
acgggctgccagtgtgcacttggcgg

SEQ ID NO: 26200 - DNA, 26 bp, Homo sapiens
cgggctgccagtgtgcacttggcggc

SEQ ID NO: 26201 - DNA, 26 bp, Homo sapiens
gggctgccagtgtgcacttggcggcc

SEQ ID NO: 26202 - DNA, 26 bp, Homo sapiens
ggctgccagtgtgcacttggcggcca

SEQ ID NO: 26203 - DNA, 26 bp, Homo sapiens
gctgccagtgtgcacttggcggccac

SEQ ID NO: 26204 - DNA, 26 bp, Homo sapiens
ctgccagtgtgcacttggcggccacc

SEQ ID NO: 26205 - DNA, 26 bp, Homo sapiens
tgccagtgtgcacttggcggccacca

SEQ ID NO: 26206 - DNA, 26 bp, Homo sapiens
gccagtgtgcacttggcggccaccag

SEQ ID NO: 26207 - DNA, 26 bp, Homo sapiens
ccagtgtgcacttggcggccaccagc

SEQ ID NO: 26208 - DNA, 26 bp, Homo sapiens
cagtgtgcacttggcggccaccagcc

SEQ ID NO: 26209 - DNA, 26 bp, Homo sapiens
agtgtgcacttggcggccaccagccg

SEQ ID NO: 26210 - DNA, 26 bp, Homo sapiens
gtgtgcacttggcggccaccagccgg

SEQ ID NO: 26211 - DNA, 26 bp, Homo sapiens
tgtgcacttggcggccaccagccggg

SEQ ID NO: 26212 - DNA, 26 bp, Homo sapiens
gtgcacttggcggccaccagccgggc

SEQ ID NO: 26213 - DNA, 26 bp, Homo sapiens
tgcacttggcggccaccagccgggcc

SEQ ID NO: 26214 - DNA, 26 bp, Homo sapiens
gcacttggcggccaccagccgggccg

SEQ ID NO: 26215 - DNA, 26 bp, Homo sapiens
cacttggcggccaccagccgggccgc

SEQ ID NO: 26216 - DNA, 26 bp, Homo sapiens
acttggcggccaccagccgggccgct

SEQ ID NO: 26217 - DNA, 26 bp, Homo sapiens
cttggcggccaccagccgggccgctt

SEQ ID NO: 26218 - DNA, 26 bp, Homo sapiens
ttggcggccaccagccgggccgcttt

SEQ ID NO: 26219 - DNA, 26 bp, Homo sapiens
tggcggccaccagccgggccgctttc

SEQ ID NO: 26220 - DNA, 26 bp, Homo sapiens
ggcggccaccagccgggccgctttcc

SEQ ID NO: 26221 - DNA, 26 bp, Homo sapiens
gcggccaccagccgggccgctttccg

SEQ ID NO: 26222 - DNA, 26 bp, Homo sapiens
cggccaccagccgggccgctttccgc

SEQ ID NO: 26223 - DNA, 26 bp, Homo sapiens
ggccaccagccgggccgctttccgcc

SEQ ID NO: 26224 - DNA, 26 bp, Homo sapiens
gccaccagccgggccgctttccgccg

SEQ ID NO: 26225 - DNA, 26 bp, Homo sapiens
ccaccagccgggccgctttccgccgc

SEQ ID NO: 26226 - DNA, 26 bp, Homo sapiens
caccagccgggccgctttccgccgca

SEQ ID NO: 26227 - DNA, 26 bp, Homo sapiens
accagccgggccgctttccgccgcag

SEQ ID NO: 26228 - DNA, 26 bp, Homo sapiens
ccagccgggccgctttccgccgcaga

SEQ ID NO: 26229 - DNA, 26 bp, Homo sapiens
cagccgggccgctttccgccgcagat

SEQ ID NO: 26230 - DNA, 26 bp, Homo sapiens
agccgggccgctttccgccgcagatc

SEQ ID NO: 26231 - DNA, 26 bp, Homo sapiens
gccgggccgctttccgccgcagatcc

SEQ ID NO: 26232 - DNA, 26 bp, Homo sapiens
ccgggccgctttccgccgcagatccg

SEQ ID NO: 26233 - DNA, 26 bp, Homo sapiens
cgggccgctttccgccgcagatccgg

SEQ ID NO: 26234 - DNA, 26 bp, Homo sapiens
gggccgctttccgccgcagatccggt

SEQ ID NO: 26235 - DNA, 26 bp, Homo sapiens
ggccgctttccgccgcagatccggtg

SEQ ID NO: 26236 - DNA, 26 bp, Homo sapiens
gccgctttccgccgcagatccggtgg

SEQ ID NO: 26237 - DNA, 26 bp, Homo sapiens
ccgctttccgccgcagatccggtggc

SEQ ID NO: 26238 - DNA, 26 bp, Homo sapiens
cgctttccgccgcagatccggtggca

SEQ ID NO: 26239 - DNA, 26 bp, Homo sapiens
gctttccgccgcagatccggtggcag

SEQ ID NO: 26240 - DNA, 26 bp, Homo sapiens
ctttccgccgcagatccggtggcagg

SEQ ID NO: 26241 - DNA, 26 bp, Homo sapiens
tttccgccgcagatccggtggcaggg

SEQ ID NO: 26242 - DNA, 26 bp, Homo sapiens
ttccgccgcagatccggtggcaggga

SEQ ID NO: 26243 - DNA, 26 bp, Homo sapiens
tccgccgcagatccggtggcagggac

SEQ ID NO: 26244 - DNA, 26 bp, Homo sapiens
ccgccgcagatccggtggcagggact

SEQ ID NO: 26245 - DNA, 26 bp, Homo sapiens
cgccgcagatccggtggcagggactg

SEQ ID NO: 26246 - DNA, 26 bp, Homo sapiens
gccgcagatccggtggcagggactgc

SEQ ID NO: 26247 - DNA, 26 bp, Homo sapiens
ccgcagatccggtggcagggactgca

SEQ ID NO: 26248 - DNA, 26 bp, Homo sapiens
cgcagatccggtggcagggactgcac

SEQ ID NO: 26249 - DNA, 26 bp, Homo sapiens
gcagatccggtggcagggactgcacg

SEQ ID NO: 26250 - DNA, 26 bp, Homo sapiens
cagatccggtggcagggactgcacga

SEQ ID NO: 26251 - DNA, 26 bp, Homo sapiens
agatccggtggcagggactgcacgat

SEQ ID NO: 26252 - DNA, 26 bp, Homo sapiens
gatccggtggcagggactgcacgatg

SEQ ID NO: 26253 - DNA, 26 bp, Homo sapiens
atccggtggcagggactgcacgatgt

SEQ ID NO: 26254 - DNA, 26 bp, Homo sapiens
tccggtggcagggactgcacgatgtc

SEQ ID NO: 26255 - DNA, 26 bp, Homo sapiens
ccggtggcagggactgcacgatgtca

SEQ ID NO: 26256 - DNA, 26 bp, Homo sapiens
cggtggcagggactgcacgatgtcac

SEQ ID NO: 26257 - DNA, 26 bp, Homo sapiens
ggtggcagggactgcacgatgtcact

SEQ ID NO: 26258 - DNA, 26 bp, Homo sapiens
gtggcagggactgcacgatgtcactg

SEQ ID NO: 26259 - DNA, 26 bp, Homo sapiens
tggcagggactgcacgatgtcactgt

SEQ ID NO: 26260 - DNA, 26 bp, Homo sapiens
ggcagggactgcacgatgtcactgtg

SEQ ID NO: 26261 - DNA, 26 bp, Homo sapiens
gcagggactgcacgatgtcactgtgg

SEQ ID NO: 26262 - DNA, 26 bp, Homo sapiens
cagggactgcacgatgtcactgtggt

SEQ ID NO: 26263 - DNA, 26 bp, Homo sapiens
agggactgcacgatgtcactgtggta

SEQ ID NO: 26264 - DNA, 26 bp, Homo sapiens
gggactgcacgatgtcactgtggtag

SEQ ID NO: 26265 - DNA, 26 bp, Homo sapiens
ggactgcacgatgtcactgtggtaga

SEQ ID NO: 26266 - DNA, 26 bp, Homo sapiens
gactgcacgatgtcactgtggtagat

SEQ ID NO: 26267 - DNA, 26 bp, Homo sapiens
actgcacgatgtcactgtggtagatg

SEQ ID NO: 26268 - DNA, 26 bp, Homo sapiens
ctgcacgatgtcactgtggtagatgt

SEQ ID NO: 26269 - DNA, 26 bp, Homo sapiens
tgcacgatgtcactgtggtagatgta

SEQ ID NO: 26270 - DNA, 26 bp, Homo sapiens
gcacgatgtcactgtggtagatgtag

SEQ ID NO: 26271 - DNA, 26 bp, Homo sapiens
cacgatgtcactgtggtagatgtagc

SEQ ID NO: 26272 - DNA, 26 bp, Homo sapiens
acgatgtcactgtggtagatgtagcc

SEQ ID NO: 26273 - DNA, 26 bp, Homo sapiens
cgatgtcactgtggtagatgtagccg

SEQ ID NO: 26274 - DNA, 26 bp, Homo sapiens
gatgtcactgtggtagatgtagccgg

SEQ ID NO: 26275 - DNA, 26 bp, Homo sapiens
atgtcactgtggtagatgtagccggt

SEQ ID NO: 26276 - DNA, 26 bp, Homo sapiens
tgtcactgtggtagatgtagccggtg

SEQ ID NO: 26277 - DNA, 26 bp, Homo sapiens
gtcactgtggtagatgtagccggtgt

SEQ ID NO: 26278 - DNA, 26 bp, Homo sapiens
tcactgtggtagatgtagccggtgtg

SEQ ID NO: 26279 - DNA, 26 bp, Homo sapiens
cactgtggtagatgtagccggtgtgg

SEQ ID NO: 26280 - DNA, 26 bp, Homo sapiens
actgtggtagatgtagccggtgtggg

SEQ ID NO: 26281 - DNA, 26 bp, Homo sapiens
ctgtggtagatgtagccggtgtgggg

SEQ ID NO: 26282 - DNA, 26 bp, Homo sapiens
tgtggtagatgtagccggtgtggggc

SEQ ID NO: 26283 - DNA, 26 bp, Homo sapiens
gtggtagatgtagccggtgtggggca

SEQ ID NO: 26284 - DNA, 26 bp, Homo sapiens
tggtagatgtagccggtgtggggcag

SEQ ID NO: 26285 - DNA, 26 bp, Homo sapiens
ggtagatgtagccggtgtggggcagc

SEQ ID NO: 26286 - DNA, 26 bp, Homo sapiens
gtagatgtagccggtgtggggcagca

SEQ ID NO: 26287 - DNA, 26 bp, Homo sapiens
tagatgtagccggtgtggggcagcac

SEQ ID NO: 26288 - DNA, 26 bp, Homo sapiens
agatgtagccggtgtggggcagcact

SEQ ID NO: 26289 - DNA, 26 bp, Homo sapiens
gatgtagccggtgtggggcagcactg

SEQ ID NO: 26290 - DNA, 26 bp, Homo sapiens
atgtagccggtgtggggcagcactga

SEQ ID NO: 26291 - DNA, 26 bp, Homo sapiens
tgtagccggtgtggggcagcactgag

SEQ ID NO: 26292 - DNA, 26 bp, Homo sapiens
gtagccggtgtggggcagcactgagg

SEQ ID NO: 26293 - DNA, 26 bp, Homo sapiens
tagccggtgtggggcagcactgaggt

SEQ ID NO: 26294 - DNA, 26 bp, Homo sapiens
agccggtgtggggcagcactgaggta

SEQ ID NO: 26295 - DNA, 26 bp, Homo sapiens
gccggtgtggggcagcactgaggtag

SEQ ID NO: 26296 - DNA, 26 bp, Homo sapiens
ccggtgtggggcagcactgaggtaga

SEQ ID NO: 26297 - DNA, 26 bp, Homo sapiens
cggtgtggggcagcactgaggtagac

SEQ ID NO: 26298 - DNA, 26 bp, Homo sapiens
ggtgtggggcagcactgaggtagacg

SEQ ID NO: 26299 - DNA, 26 bp, Homo sapiens
gtgtggggcagcactgaggtagacga

SEQ ID NO: 26300 - DNA, 26 bp, Homo sapiens
tgtggggcagcactgaggtagacgag

SEQ ID NO: 26301 - DNA, 26 bp, Homo sapiens
gtggggcagcactgaggtagacgaga

SEQ ID NO: 26302 - DNA, 26 bp, Homo sapiens
tggggcagcactgaggtagacgagaa

SEQ ID NO: 26303 - DNA, 26 bp, Homo sapiens
ggggcagcactgaggtagacgagaag

SEQ ID NO: 26304 - DNA, 26 bp, Homo sapiens
gggcagcactgaggtagacgagaagc

SEQ ID NO: 26305 - DNA, 26 bp, Homo sapiens
ggcagcactgaggtagacgagaagcc

SEQ ID NO: 26306 - DNA, 26 bp, Homo sapiens
gcagcactgaggtagacgagaagccc

SEQ ID NO: 26307 - DNA, 26 bp, Homo sapiens
cagcactgaggtagacgagaagcccg

SEQ ID NO: 26308 - DNA, 26 bp, Homo sapiens
agcactgaggtagacgagaagcccga

SEQ ID NO: 26309 - DNA, 26 bp, Homo sapiens
gcactgaggtagacgagaagcccgac

SEQ ID NO: 26310 - DNA, 26 bp, Homo sapiens
cactgaggtagacgagaagcccgaca

SEQ ID NO: 26311 - DNA, 26 bp, Homo sapiens
actgaggtagacgagaagcccgacag

SEQ ID NO: 26312 - DNA, 26 bp, Homo sapiens
ctgaggtagacgagaagcccgacagc

SEQ ID NO: 26313 - DNA, 26 bp, Homo sapiens
tgaggtagacgagaagcccgacagcg

SEQ ID NO: 26314 - DNA, 26 bp, Homo sapiens
gaggtagacgagaagcccgacagcgt

SEQ ID NO: 26315 - DNA, 26 bp, Homo sapiens
aggtagacgagaagcccgacagcgtc

SEQ ID NO: 26316 - DNA, 26 bp, Homo sapiens
ggtagacgagaagcccgacagcgtct

SEQ ID NO: 26317 - DNA, 26 bp, Homo sapiens
gtagacgagaagcccgacagcgtctt

SEQ ID NO: 26318 - DNA, 26 bp, Homo sapiens
tagacgagaagcccgacagcgtcttg

SEQ ID NO: 26319 - DNA, 26 bp, Homo sapiens
agacgagaagcccgacagcgtcttgc

SEQ ID NO: 26320 - DNA, 26 bp, Homo sapiens
gacgagaagcccgacagcgtcttgcg

SEQ ID NO: 26321 - DNA, 26 bp, Homo sapiens
acgagaagcccgacagcgtcttgcgc

SEQ ID NO: 26322 - DNA, 26 bp, Homo sapiens
cgagaagcccgacagcgtcttgcgct

SEQ ID NO: 26323 - DNA, 26 bp, Homo sapiens
gagaagcccgacagcgtcttgcgctg

SEQ ID NO: 26324 - DNA, 26 bp, Homo sapiens
agaagcccgacagcgtcttgcgctgg

SEQ ID NO: 26325 - DNA, 26 bp, Homo sapiens
gaagcccgacagcgtcttgcgctggg

SEQ ID NO: 26326 - DNA, 26 bp, Homo sapiens
aagcccgacagcgtcttgcgctgggc

SEQ ID NO: 26327 - DNA, 26 bp, Homo sapiens
agcccgacagcgtcttgcgctgggcc

SEQ ID NO: 26328 - DNA, 26 bp, Homo sapiens
gcccgacagcgtcttgcgctgggccc

SEQ ID NO: 26329 - DNA, 26 bp, Homo sapiens
cccgacagcgtcttgcgctgggcccc

SEQ ID NO: 26330 - DNA, 26 bp, Homo sapiens
ccgacagcgtcttgcgctgggccccg

SEQ ID NO: 26331 - DNA, 26 bp, Homo sapiens
cgacagcgtcttgcgctgggccccga

SEQ ID NO: 26332 - DNA, 26 bp, Homo sapiens
gacagcgtcttgcgctgggccccgag

SEQ ID NO: 26333 - DNA, 26 bp, Homo sapiens
acagcgtcttgcgctgggccccgagc

SEQ ID NO: 26334 - DNA, 26 bp, Homo sapiens
cagcgtcttgcgctgggccccgagca

SEQ ID NO: 26335 - DNA, 26 bp, Homo sapiens
agcgtcttgcgctgggccccgagcag

SEQ ID NO: 26336 - DNA, 26 bp, Homo sapiens
gcgtcttgcgctgggccccgagcagc

SEQ ID NO: 26337 - DNA, 26 bp, Homo sapiens
cgtcttgcgctgggccccgagcagca

SEQ ID NO: 26338 - DNA, 26 bp, Homo sapiens
gtcttgcgctgggccccgagcagcat

SEQ ID NO: 26339 - DNA, 26 bp, Homo sapiens
tcttgcgctgggccccgagcagcatg

SEQ ID NO: 26340 - DNA, 26 bp, Homo sapiens
cttgcgctgggccccgagcagcatga

SEQ ID NO: 26341 - DNA, 26 bp, Homo sapiens
ttgcgctgggccccgagcagcatgat

SEQ ID NO: 26342 - DNA, 26 bp, Homo sapiens
tgcgctgggccccgagcagcatgatg

SEQ ID NO: 26343 - DNA, 26 bp, Homo sapiens
gcgctgggccccgagcagcatgatgt

SEQ ID NO: 26344 - DNA, 26 bp, Homo sapiens
cgctgggccccgagcagcatgatgtt

SEQ ID NO: 26345 - DNA, 26 bp, Homo sapiens
gctgggccccgagcagcatgatgttg

SEQ ID NO: 26346 - DNA, 26 bp, Homo sapiens
ctgggccccgagcagcatgatgttgc

SEQ ID NO: 26347 - DNA, 26 bp, Homo sapiens
tgggccccgagcagcatgatgttgca

SEQ ID NO: 26348 - DNA, 26 bp, Homo sapiens
gggccccgagcagcatgatgttgcag

SEQ ID NO: 26349 - DNA, 26 bp, Homo sapiens
ggccccgagcagcatgatgttgcagg

SEQ ID NO: 26350 - DNA, 26 bp, Homo sapiens
gccccgagcagcatgatgttgcaggc

SEQ ID NO: 26351 - DNA, 26 bp, Homo sapiens
ccccgagcagcatgatgttgcaggcg

SEQ ID NO: 26352 - DNA, 26 bp, Homo sapiens
cccgagcagcatgatgttgcaggcgg

SEQ ID NO: 26353 - DNA, 26 bp, Homo sapiens
ccgagcagcatgatgttgcaggcggg

SEQ ID NO: 26354 - DNA, 26 bp, Homo sapiens
cgagcagcatgatgttgcaggcgggc

SEQ ID NO: 26355 - DNA, 26 bp, Homo sapiens
gagcagcatgatgttgcaggcgggca

SEQ ID NO: 26356 - DNA, 26 bp, Homo sapiens
agcagcatgatgttgcaggcgggcat

SEQ ID NO: 26357 - DNA, 26 bp, Homo sapiens
gcagcatgatgttgcaggcgggcatc

SEQ ID NO: 26358 - DNA, 26 bp, Homo sapiens
cagcatgatgttgcaggcgggcatct

SEQ ID NO: 26359 - DNA, 26 bp, Homo sapiens
agcatgatgttgcaggcgggcatctt

SEQ ID NO: 26360 - DNA, 26 bp, Homo sapiens
gcatgatgttgcaggcgggcatcttg

SEQ ID NO: 26361 - DNA, 26 bp, Homo sapiens
catgatgttgcaggcgggcatcttgg

SEQ ID NO: 26362 - DNA, 26 bp, Homo sapiens
atgatgttgcaggcgggcatcttgga

SEQ ID NO: 26363 - DNA, 26 bp, Homo sapiens
tgatgttgcaggcgggcatcttggag

SEQ ID NO: 26364 - DNA, 26 bp, Homo sapiens
gatgttgcaggcgggcatcttggaga

SEQ ID NO: 26365 - DNA, 26 bp, Homo sapiens
atgttgcaggcgggcatcttggagag

SEQ ID NO: 26366 - DNA, 26 bp, Homo sapiens
tgttgcaggcgggcatcttggagagg

SEQ ID NO: 26367 - DNA, 26 bp, Homo sapiens
gttgcaggcgggcatcttggagaggt

SEQ ID NO: 26368 - DNA, 26 bp, Homo sapiens
ttgcaggcgggcatcttggagaggtt

SEQ ID NO: 26369 - DNA, 26 bp, Homo sapiens
tgcaggcgggcatcttggagaggttg

SEQ ID NO: 26370 - DNA, 26 bp, Homo sapiens
gcaggcgggcatcttggagaggttgg

SEQ ID NO: 26371 - DNA, 26 bp, Homo sapiens
caggcgggcatcttggagaggttggt

SEQ ID NO: 26372 - DNA, 26 bp, Homo sapiens
aggcgggcatcttggagaggttggtc

SEQ ID NO: 26373 - DNA, 26 bp, Homo sapiens
ggcgggcatcttggagaggttggtca

SEQ ID NO: 26374 - DNA, 26 bp, Homo sapiens
gcgggcatcttggagaggttggtcag

SEQ ID NO: 26375 - DNA, 26 bp, Homo sapiens
cgggcatcttggagaggttggtcagg

SEQ ID NO: 26376 - DNA, 26 bp, Homo sapiens
gggcatcttggagaggttggtcaggc

SEQ ID NO: 26377 - DNA, 26 bp, Homo sapiens
ggcatcttggagaggttggtcaggcc

SEQ ID NO: 26378 - DNA, 26 bp, Homo sapiens
gcatcttggagaggttggtcaggccg

SEQ ID NO: 26379 - DNA, 26 bp, Homo sapiens
catcttggagaggttggtcaggccgc

SEQ ID NO: 26380 - DNA, 26 bp, Homo sapiens
atcttggagaggttggtcaggccgcc

SEQ ID NO: 26381 - DNA, 26 bp, Homo sapiens
tcttggagaggttggtcaggccgccg

SEQ ID NO: 26382 - DNA, 26 bp, Homo sapiens
cttggagaggttggtcaggccgccgg

SEQ ID NO: 26383 - DNA, 26 bp, Homo sapiens
ttggagaggttggtcaggccgccggc

SEQ ID NO: 26384 - DNA, 26 bp, Homo sapiens
tggagaggttggtcaggccgccggcc

SEQ ID NO: 26385 - DNA, 26 bp, Homo sapiens
ggagaggttggtcaggccgccggcca

SEQ ID NO: 26386 - DNA, 26 bp, Homo sapiens
gagaggttggtcaggccgccggccac

SEQ ID NO: 26387 - DNA, 26 bp, Homo sapiens
agaggttggtcaggccgccggccaca

SEQ ID NO: 26388 - DNA, 26 bp, Homo sapiens
gaggttggtcaggccgccggccacac

SEQ ID NO: 26389 - DNA, 26 bp, Homo sapiens
aggttggtcaggccgccggccacacc

SEQ ID NO: 26390 - DNA, 26 bp, Homo sapiens
ggttggtcaggccgccggccacaccc

SEQ ID NO: 26391 - DNA, 26 bp, Homo sapiens
gttggtcaggccgccggccacaccca

SEQ ID NO: 26392 - DNA, 26 bp, Homo sapiens
ttggtcaggccgccggccacacccat

SEQ ID NO: 26393 - DNA, 26 bp, Homo sapiens
tggtcaggccgccggccacacccatg

SEQ ID NO: 26394 - DNA, 26 bp, Homo sapiens
ggtcaggccgccggccacacccatga

SEQ ID NO: 26395 - DNA, 26 bp, Homo sapiens
gtcaggccgccggccacacccatgat

SEQ ID NO: 26396 - DNA, 26 bp, Homo sapiens
tcaggccgccggccacacccatgatc

SEQ ID NO: 26397 - DNA, 26 bp, Homo sapiens
caggccgccggccacacccatgatct

SEQ ID NO: 26398 - DNA, 26 bp, Homo sapiens
aggccgccggccacacccatgatctt

SEQ ID NO: 26399 - DNA, 26 bp, Homo sapiens
ggccgccggccacacccatgatcttg

SEQ ID NO: 26400 - DNA, 26 bp, Homo sapiens
gccgccggccacacccatgatcttgg

SEQ ID NO: 26401 - DNA, 26 bp, Homo sapiens
ccgccggccacacccatgatcttggc

SEQ ID NO: 26402 - DNA, 26 bp, Homo sapiens
cgccggccacacccatgatcttggcg

SEQ ID NO: 26403 - DNA, 26 bp, Homo sapiens
gccggccacacccatgatcttggcgg

SEQ ID NO: 26404 - DNA, 26 bp, Homo sapiens
ccggccacacccatgatcttggcggc

SEQ ID NO: 26405 - DNA, 26 bp, Homo sapiens
cggccacacccatgatcttggcggcc

SEQ ID NO: 26406 - DNA, 26 bp, Homo sapiens
ggccacacccatgatcttggcggccg

SEQ ID NO: 26407 - DNA, 26 bp, Homo sapiens
gccacacccatgatcttggcggccgt

SEQ ID NO: 26408 - DNA, 26 bp, Homo sapiens
ccacacccatgatcttggcggccgtg

SEQ ID NO: 26409 - DNA, 26 bp, Homo sapiens
cacacccatgatcttggcggccgtgg

SEQ ID NO: 26410 - DNA, 26 bp, Homo sapiens
acacccatgatcttggcggccgtgga

SEQ ID NO: 26411 - DNA, 26 bp, Homo sapiens
cacccatgatcttggcggccgtggat

SEQ ID NO: 26412 - DNA, 26 bp, Homo sapiens
acccatgatcttggcggccgtggatg

SEQ ID NO: 26413 - DNA, 26 bp, Homo sapiens
cccatgatcttggcggccgtggatgc

SEQ ID NO: 26414 - DNA, 26 bp, Homo sapiens
ccatgatcttggcggccgtggatgcc

SEQ ID NO: 26415 - DNA, 26 bp, Homo sapiens
catgatcttggcggccgtggatgccc

SEQ ID NO: 26416 - DNA, 26 bp, Homo sapiens
atgatcttggcggccgtggatgcccc

SEQ ID NO: 26417 - DNA, 26 bp, Homo sapiens
tgatcttggcggccgtggatgccccg

SEQ ID NO: 26418 - DNA, 26 bp, Homo sapiens
gatcttggcggccgtggatgccccga

SEQ ID NO: 26419 - DNA, 26 bp, Homo sapiens
atcttggcggccgtggatgccccgat

SEQ ID NO: 26420 - DNA, 26 bp, Homo sapiens
tcttggcggccgtggatgccccgata

SEQ ID NO: 26421 - DNA, 26 bp, Homo sapiens
cttggcggccgtggatgccccgataa

SEQ ID NO: 26422 - DNA, 26 bp, Homo sapiens
ttggcggccgtggatgccccgataat

SEQ ID NO: 26423 - DNA, 26 bp, Homo sapiens
tggcggccgtggatgccccgataatg

SEQ ID NO: 26424 - DNA, 26 bp, Homo sapiens
ggcggccgtggatgccccgataatga

SEQ ID NO: 26425 - DNA, 26 bp, Homo sapiens
gcggccgtggatgccccgataatgat

SEQ ID NO: 26426 - DNA, 26 bp, Homo sapiens
cggccgtggatgccccgataatgatg

SEQ ID NO: 26427 - DNA, 26 bp, Homo sapiens
ggccgtggatgccccgataatgatgg

SEQ ID NO: 26428 - DNA, 26 bp, Homo sapiens
gccgtggatgccccgataatgatgga

SEQ ID NO: 26429 - DNA, 26 bp, Homo sapiens
ccgtggatgccccgataatgatggac

SEQ ID NO: 26430 - DNA, 26 bp, Homo sapiens
cgtggatgccccgataatgatggaca

SEQ ID NO: 26431 - DNA, 26 bp, Homo sapiens
gtggatgccccgataatgatggacag

SEQ ID NO: 26432 - DNA, 26 bp, Homo sapiens
tggatgccccgataatgatggacagg

SEQ ID NO: 26433 - DNA, 26 bp, Homo sapiens
ggatgccccgataatgatggacaggt

SEQ ID NO: 26434 - DNA, 26 bp, Homo sapiens
gatgccccgataatgatggacaggtt

SEQ ID NO: 26435 - DNA, 26 bp, Homo sapiens
atgccccgataatgatggacaggttg

SEQ ID NO: 26436 - DNA, 26 bp, Homo sapiens
tgccccgataatgatggacaggttgg

SEQ ID NO: 26437 - DNA, 26 bp, Homo sapiens
gccccgataatgatggacaggttggg

SEQ ID NO: 26438 - DNA, 26 bp, Homo sapiens
ccccgataatgatggacaggttgggt

SEQ ID NO: 26439 - DNA, 26 bp, Homo sapiens
cccgataatgatggacaggttgggtg

SEQ ID NO: 26440 - DNA, 26 bp, Homo sapiens
ccgataatgatggacaggttgggtgc

SEQ ID NO: 26441 - DNA, 26 bp, Homo sapiens
cgataatgatggacaggttgggtgcg

SEQ ID NO: 26442 - DNA, 26 bp, Homo sapiens
gataatgatggacaggttgggtgcga

SEQ ID NO: 26443 - DNA, 26 bp, Homo sapiens
ataatgatggacaggttgggtgcgat

SEQ ID NO: 26444 - DNA, 26 bp, Homo sapiens
taatgatggacaggttgggtgcgatg

SEQ ID NO: 26445 - DNA, 26 bp, Homo sapiens
aatgatggacaggttgggtgcgatga

SEQ ID NO: 26446 - DNA, 26 bp, Homo sapiens
atgatggacaggttgggtgcgatgaa

SEQ ID NO: 26447 - DNA, 26 bp, Homo sapiens
tgatggacaggttgggtgcgatgaag

SEQ ID NO: 26448 - DNA, 26 bp, Homo sapiens
gatggacaggttgggtgcgatgaagg

SEQ ID NO: 26449 - DNA, 26 bp, Homo sapiens
atggacaggttgggtgcgatgaagga

SEQ ID NO: 26450 - DNA, 26 bp, Homo sapiens
tggacaggttgggtgcgatgaaggac

SEQ ID NO: 26451 - DNA, 26 bp, Homo sapiens
ggacaggttgggtgcgatgaaggaca

SEQ ID NO: 26452 - DNA, 26 bp, Homo sapiens
gacaggttgggtgcgatgaaggacat

SEQ ID NO: 26453 - DNA, 26 bp, Homo sapiens
acaggttgggtgcgatgaaggacatc

SEQ ID NO: 26454 - DNA, 26 bp, Homo sapiens
caggttgggtgcgatgaaggacatcc

SEQ ID NO: 26455 - DNA, 26 bp, Homo sapiens
aggttgggtgcgatgaaggacatccg

SEQ ID NO: 26456 - DNA, 26 bp, Homo sapiens
ggttgggtgcgatgaaggacatccgg

SEQ ID NO: 26457 - DNA, 26 bp, Homo sapiens
gttgggtgcgatgaaggacatccggg

SEQ ID NO: 26458 - DNA, 26 bp, Homo sapiens
ttgggtgcgatgaaggacatccggga

SEQ ID NO: 26459 - DNA, 26 bp, Homo sapiens
tgggtgcgatgaaggacatccgggac

SEQ ID NO: 26460 - DNA, 26 bp, Homo sapiens
gggtgcgatgaaggacatccgggact

SEQ ID NO: 26461 - DNA, 26 bp, Homo sapiens
ggtgcgatgaaggacatccgggactc

SEQ ID NO: 26462 - DNA, 26 bp, Homo sapiens
gtgcgatgaaggacatccgggactcc

SEQ ID NO: 26463 - DNA, 26 bp, Homo sapiens
tgcgatgaaggacatccgggactcca

SEQ ID NO: 26464 - DNA, 26 bp, Homo sapiens
gcgatgaaggacatccgggactccac

SEQ ID NO: 26465 - DNA, 26 bp, Homo sapiens
cgatgaaggacatccgggactccaca

SEQ ID NO: 26466 - DNA, 26 bp, Homo sapiens
gatgaaggacatccgggactccacat

SEQ ID NO: 26467 - DNA, 26 bp, Homo sapiens
atgaaggacatccgggactccacata

SEQ ID NO: 26468 - DNA, 26 bp, Homo sapiens
tgaaggacatccgggactccacatac

SEQ ID NO: 26469 - DNA, 26 bp, Homo sapiens
gaaggacatccgggactccacatact

SEQ ID NO: 26470 - DNA, 26 bp, Homo sapiens
aaggacatccgggactccacatactc

SEQ ID NO: 26471 - DNA, 26 bp, Homo sapiens
aggacatccgggactccacatactcg

SEQ ID NO: 26472 - DNA, 26 bp, Homo sapiens
ggacatccgggactccacatactcgt

SEQ ID NO: 26473 - DNA, 26 bp, Homo sapiens
gacatccgggactccacatactcgta

SEQ ID NO: 26474 - DNA, 26 bp, Homo sapiens
acatccgggactccacatactcgtag

SEQ ID NO: 26475 - DNA, 26 bp, Homo sapiens
catccgggactccacatactcgtaga

SEQ ID NO: 26476 - DNA, 26 bp, Homo sapiens
atccgggactccacatactcgtagat

SEQ ID NO: 26477 - DNA, 26 bp, Homo sapiens
tccgggactccacatactcgtagatg

SEQ ID NO: 26478 - DNA, 26 bp, Homo sapiens
ccgggactccacatactcgtagatgc

SEQ ID NO: 26479 - DNA, 26 bp, Homo sapiens
cgggactccacatactcgtagatgcg

SEQ ID NO: 26480 - DNA, 26 bp, Homo sapiens
gggactccacatactcgtagatgcgg

SEQ ID NO: 26481 - DNA, 26 bp, Homo sapiens
ggactccacatactcgtagatgcggt

SEQ ID NO: 26482 - DNA, 26 bp, Homo sapiens
gactccacatactcgtagatgcggtg

SEQ ID NO: 26483 - DNA, 26 bp, Homo sapiens
actccacatactcgtagatgcggtgc

SEQ ID NO: 26484 - DNA, 26 bp, Homo sapiens
ctccacatactcgtagatgcggtgct

SEQ ID NO: 26485 - DNA, 26 bp, Homo sapiens
tccacatactcgtagatgcggtgctt

SEQ ID NO: 26486 - DNA, 26 bp, Homo sapiens
ccacatactcgtagatgcggtgcttg

SEQ ID NO: 26487 - DNA, 26 bp, Homo sapiens
cacatactcgtagatgcggtgcttgg

SEQ ID NO: 26488 - DNA, 26 bp, Homo sapiens
acatactcgtagatgcggtgcttgga

SEQ ID NO: 26489 - DNA, 26 bp, Homo sapiens
catactcgtagatgcggtgcttggag

SEQ ID NO: 26490 - DNA, 26 bp, Homo sapiens
atactcgtagatgcggtgcttggagg

SEQ ID NO: 26491 - DNA, 26 bp, Homo sapiens
tactcgtagatgcggtgcttggaggc

SEQ ID NO: 26492 - DNA, 26 bp, Homo sapiens
actcgtagatgcggtgcttggaggcg

SEQ ID NO: 26493 - DNA, 26 bp, Homo sapiens
ctcgtagatgcggtgcttggaggcgt

SEQ ID NO: 26494 - DNA, 26 bp, Homo sapiens
tcgtagatgcggtgcttggaggcgtt

SEQ ID NO: 26495 - DNA, 26 bp, Homo sapiens
cgtagatgcggtgcttggaggcgttc

SEQ ID NO: 26496 - DNA, 26 bp, Homo sapiens
gtagatgcggtgcttggaggcgttca

SEQ ID NO: 26497 - DNA, 26 bp, Homo sapiens
tagatgcggtgcttggaggcgttcag

SEQ ID NO: 26498 - DNA, 26 bp, Homo sapiens
agatgcggtgcttggaggcgttcagc

SEQ ID NO: 26499 - DNA, 26 bp, Homo sapiens
gatgcggtgcttggaggcgttcagct

SEQ ID NO: 26500 - DNA, 26 bp, Homo sapiens
atgcggtgcttggaggcgttcagctc

SEQ ID NO: 26501 - DNA, 26 bp, Homo sapiens
tgcggtgcttggaggcgttcagctcc

SEQ ID NO: 26502 - DNA, 26 bp, Homo sapiens
gcggtgcttggaggcgttcagctcca

SEQ ID NO: 26503 - DNA, 26 bp, Homo sapiens
cggtgcttggaggcgttcagctccag

SEQ ID NO: 26504 - DNA, 26 bp, Homo sapiens
ggtgcttggaggcgttcagctccagc

SEQ ID NO: 26505 - DNA, 26 bp, Homo sapiens
gtgcttggaggcgttcagctccagcg

SEQ ID NO: 26506 - DNA, 26 bp, Homo sapiens
tgcttggaggcgttcagctccagcgc

SEQ ID NO: 26507 - DNA, 26 bp, Homo sapiens
gcttggaggcgttcagctccagcgcc

SEQ ID NO: 26508 - DNA, 26 bp, Homo sapiens
cttggaggcgttcagctccagcgcca

SEQ ID NO: 26509 - DNA, 26 bp, Homo sapiens
ttggaggcgttcagctccagcgccat

SEQ ID NO: 26510 - DNA, 26 bp, Homo sapiens
tggaggcgttcagctccagcgccatg

SEQ ID NO: 26511 - DNA, 26 bp, Homo sapiens
ggaggcgttcagctccagcgccatgt

SEQ ID NO: 26512 - DNA, 26 bp, Homo sapiens
gaggcgttcagctccagcgccatgtc

SEQ ID NO: 26513 - DNA, 26 bp, Homo sapiens
aggcgttcagctccagcgccatgtcg

SEQ ID NO: 26514 - DNA, 26 bp, Homo sapiens
ggcgttcagctccagcgccatgtcgc

SEQ ID NO: 26515 - DNA, 26 bp, Homo sapiens
gcgttcagctccagcgccatgtcgca

SEQ ID NO: 26516 - DNA, 26 bp, Homo sapiens
cgttcagctccagcgccatgtcgcag

SEQ ID NO: 26517 - DNA, 26 bp, Homo sapiens
gttcagctccagcgccatgtcgcagg

SEQ ID NO: 26518 - DNA, 26 bp, Homo sapiens
ttcagctccagcgccatgtcgcaggc

SEQ ID NO: 26519 - DNA, 26 bp, Homo sapiens
tcagctccagcgccatgtcgcaggcc

SEQ ID NO: 26520 - DNA, 26 bp, Homo sapiens
cagctccagcgccatgtcgcaggcct

SEQ ID NO: 26521 - DNA, 26 bp, Homo sapiens
agctccagcgccatgtcgcaggcctc

SEQ ID NO: 26522 - DNA, 26 bp, Homo sapiens
gctccagcgccatgtcgcaggcctcc

SEQ ID NO: 26523 - DNA, 26 bp, Homo sapiens
ctccagcgccatgtcgcaggcctcct

SEQ ID NO: 26524 - DNA, 26 bp, Homo sapiens
tccagcgccatgtcgcaggcctcctc

SEQ ID NO: 26525 - DNA, 26 bp, Homo sapiens
ccagcgccatgtcgcaggcctcctcc

SEQ ID NO: 26526 - DNA, 26 bp, Homo sapiens
cagcgccatgtcgcaggcctcctcca

SEQ ID NO: 26527 - DNA, 26 bp, Homo sapiens
agcgccatgtcgcaggcctcctccag

SEQ ID NO: 26528 - DNA, 26 bp, Homo sapiens
gcgccatgtcgcaggcctcctccagc

SEQ ID NO: 26529 - DNA, 26 bp, Homo sapiens
cgccatgtcgcaggcctcctccagcc

SEQ ID NO: 26530 - DNA, 26 bp, Homo sapiens
gccatgtcgcaggcctcctccagccg

SEQ ID NO: 26531 - DNA, 26 bp, Homo sapiens
ccatgtcgcaggcctcctccagccgc

SEQ ID NO: 26532 - DNA, 26 bp, Homo sapiens
catgtcgcaggcctcctccagccgct

SEQ ID NO: 26533 - DNA, 26 bp, Homo sapiens
atgtcgcaggcctcctccagccgctc

SEQ ID NO: 26534 - DNA, 26 bp, Homo sapiens
tgtcgcaggcctcctccagccgctcc

SEQ ID NO: 26535 - DNA, 26 bp, Homo sapiens
gtcgcaggcctcctccagccgctcca

SEQ ID NO: 26536 - DNA, 26 bp, Homo sapiens
tcgcaggcctcctccagccgctccag

SEQ ID NO: 26537 - DNA, 26 bp, Homo sapiens
cgcaggcctcctccagccgctccagc

SEQ ID NO: 26538 - DNA, 26 bp, Homo sapiens
gcaggcctcctccagccgctccagct

SEQ ID NO: 26539 - DNA, 26 bp, Homo sapiens
caggcctcctccagccgctccagctc

SEQ ID NO: 26540 - DNA, 26 bp, Homo sapiens
aggcctcctccagccgctccagctcc

SEQ ID NO: 26541 - DNA, 26 bp, Homo sapiens
ggcctcctccagccgctccagctcct

SEQ ID NO: 26542 - DNA, 26 bp, Homo sapiens
gcctcctccagccgctccagctcctc

SEQ ID NO: 26543 - DNA, 26 bp, Homo sapiens
cctcctccagccgctccagctcctcc

SEQ ID NO: 26544 - DNA, 26 bp, Homo sapiens
ctcctccagccgctccagctcctcct

SEQ ID NO: 26545 - DNA, 26 bp, Homo sapiens
tcctccagccgctccagctcctcctc

SEQ ID NO: 26546 - DNA, 26 bp, Homo sapiens
cctccagccgctccagctcctcctcc

SEQ ID NO: 26547 - DNA, 26 bp, Homo sapiens
ctccagccgctccagctcctcctccg

SEQ ID NO: 26548 - DNA, 26 bp, Homo sapiens
tccagccgctccagctcctcctccga

SEQ ID NO: 26549 - DNA, 26 bp, Homo sapiens
ccagccgctccagctcctcctccgac

SEQ ID NO: 26550 - DNA, 26 bp, Homo sapiens
cagccgctccagctcctcctccgaca

SEQ ID NO: 26551 - DNA, 26 bp, Homo sapiens
agccgctccagctcctcctccgacag

SEQ ID NO: 26552 - DNA, 26 bp, Homo sapiens
gccgctccagctcctcctccgacagc

SEQ ID NO: 26553 - DNA, 26 bp, Homo sapiens
ccgctccagctcctcctccgacagct

SEQ ID NO: 26554 - DNA, 26 bp, Homo sapiens
cgctccagctcctcctccgacagctg

SEQ ID NO: 26555 - DNA, 26 bp, Homo sapiens
gctccagctcctcctccgacagctgc

SEQ ID NO: 26556 - DNA, 26 bp, Homo sapiens
ctccagctcctcctccgacagctgct

SEQ ID NO: 26557 - DNA, 26 bp, Homo sapiens
tccagctcctcctccgacagctgctg

SEQ ID NO: 26558 - DNA, 26 bp, Homo sapiens
ccagctcctcctccgacagctgctgc

SEQ ID NO: 26559 - DNA, 26 bp, Homo sapiens
cagctcctcctccgacagctgctgcc

SEQ ID NO: 26560 - DNA, 26 bp, Homo sapiens
agctcctcctccgacagctgctgccc

SEQ ID NO: 26561 - DNA, 26 bp, Homo sapiens
gctcctcctccgacagctgctgcccc

SEQ ID NO: 26562 - DNA, 26 bp, Homo sapiens
ctcctcctccgacagctgctgcccct

SEQ ID NO: 26563 - DNA, 26 bp, Homo sapiens
tcctcctccgacagctgctgcccctg

SEQ ID NO: 26564 - DNA, 26 bp, Homo sapiens
cctcctccgacagctgctgcccctgg

SEQ ID NO: 26565 - DNA, 26 bp, Homo sapiens
ctcctccgacagctgctgcccctggg

SEQ ID NO: 26566 - DNA, 26 bp, Homo sapiens
tcctccgacagctgctgcccctgggt

SEQ ID NO: 26567 - DNA, 26 bp, Homo sapiens
cctccgacagctgctgcccctgggtg

SEQ ID NO: 26568 - DNA, 26 bp, Homo sapiens
ctccgacagctgctgcccctgggtgg

SEQ ID NO: 26569 - DNA, 26 bp, Homo sapiens
tccgacagctgctgcccctgggtggt

SEQ ID NO: 26570 - DNA, 26 bp, Homo sapiens
ccgacagctgctgcccctgggtggtg

SEQ ID NO: 26571 - DNA, 26 bp, Homo sapiens
cgacagctgctgcccctgggtggtgg

SEQ ID NO: 26572 - DNA, 26 bp, Homo sapiens
gacagctgctgcccctgggtggtgga

SEQ ID NO: 26573 - DNA, 26 bp, Homo sapiens
acagctgctgcccctgggtggtggag

SEQ ID NO: 26574 - DNA, 26 bp, Homo sapiens
cagctgctgcccctgggtggtggagg

SEQ ID NO: 26575 - DNA, 26 bp, Homo sapiens
agctgctgcccctgggtggtggaggc

SEQ ID NO: 26576 - DNA, 26 bp, Homo sapiens
gctgctgcccctgggtggtggaggcg

SEQ ID NO: 26577 - DNA, 26 bp, Homo sapiens
ctgctgcccctgggtggtggaggcgg

SEQ ID NO: 26578 - DNA, 26 bp, Homo sapiens
tgctgcccctgggtggtggaggcggt

SEQ ID NO: 26579 - DNA, 26 bp, Homo sapiens
gctgcccctgggtggtggaggcggtg

SEQ ID NO: 26580 - DNA, 26 bp, Homo sapiens
ctgcccctgggtggtggaggcggtga

SEQ ID NO: 26581 - DNA, 26 bp, Homo sapiens
tgcccctgggtggtggaggcggtgac

SEQ ID NO: 26582 - DNA, 26 bp, Homo sapiens
gcccctgggtggtggaggcggtgacg

SEQ ID NO: 26583 - DNA, 26 bp, Homo sapiens
cccctgggtggtggaggcggtgacgc

SEQ ID NO: 26584 - DNA, 26 bp, Homo sapiens
ccctgggtggtggaggcggtgacgct

SEQ ID NO: 26585 - DNA, 26 bp, Homo sapiens
cctgggtggtggaggcggtgacgctg

SEQ ID NO: 26586 - DNA, 26 bp, Homo sapiens
ctgggtggtggaggcggtgacgctga

SEQ ID NO: 26587 - DNA, 26 bp, Homo sapiens
tgggtggtggaggcggtgacgctgac

SEQ ID NO: 26588 - DNA, 26 bp, Homo sapiens
gggtggtggaggcggtgacgctgacg

SEQ ID NO: 26589 - DNA, 26 bp, Homo sapiens
ggtggtggaggcggtgacgctgacga

SEQ ID NO: 26590 - DNA, 26 bp, Homo sapiens
gtggtggaggcggtgacgctgacgac

SEQ ID NO: 26591 - DNA, 26 bp, Homo sapiens
tggtggaggcggtgacgctgacgacc

SEQ ID NO: 26592 - DNA, 26 bp, Homo sapiens
ggtggaggcggtgacgctgacgacca

SEQ ID NO: 26593 - DNA, 26 bp, Homo sapiens
gtggaggcggtgacgctgacgaccat

SEQ ID NO: 26594 - DNA, 26 bp, Homo sapiens
tggaggcggtgacgctgacgaccatg

SEQ ID NO: 26595 - DNA, 26 bp, Homo sapiens
ggaggcggtgacgctgacgaccatga

SEQ ID NO: 26596 - DNA, 26 bp, Homo sapiens
gaggcggtgacgctgacgaccatgat

SEQ ID NO: 26597 - DNA, 26 bp, Homo sapiens
aggcggtgacgctgacgaccatgatg

SEQ ID NO: 26598 - DNA, 26 bp, Homo sapiens
ggcggtgacgctgacgaccatgatgg

SEQ ID NO: 26599 - DNA, 26 bp, Homo sapiens
gcggtgacgctgacgaccatgatggt

SEQ ID NO: 26600 - DNA, 26 bp, Homo sapiens
cggtgacgctgacgaccatgatggtg

SEQ ID NO: 26601 - DNA, 26 bp, Homo sapiens
ggtgacgctgacgaccatgatggtgg

SEQ ID NO: 26602 - DNA, 26 bp, Homo sapiens
gtgacgctgacgaccatgatggtggc

SEQ ID NO: 26603 - DNA, 26 bp, Homo sapiens
tgacgctgacgaccatgatggtggca

SEQ ID NO: 26604 - DNA, 26 bp, Homo sapiens
gacgctgacgaccatgatggtggcat

SEQ ID NO: 26605 - DNA, 26 bp, Homo sapiens
acgctgacgaccatgatggtggcatt

SEQ ID NO: 26606 - DNA, 26 bp, Homo sapiens
cgctgacgaccatgatggtggcattg

SEQ ID NO: 26607 - DNA, 26 bp, Homo sapiens
gctgacgaccatgatggtggcattgg

SEQ ID NO: 26608 - DNA, 26 bp, Homo sapiens
ctgacgaccatgatggtggcattggt

SEQ ID NO: 26609 - DNA, 26 bp, Homo sapiens
tgacgaccatgatggtggcattggtg

SEQ ID NO: 26610 - DNA, 26 bp, Homo sapiens
gacgaccatgatggtggcattggtga

SEQ ID NO: 26611 - DNA, 26 bp, Homo sapiens
acgaccatgatggtggcattggtgag

SEQ ID NO: 26612 - DNA, 26 bp, Homo sapiens
cgaccatgatggtggcattggtgagg

SEQ ID NO: 26613 - DNA, 26 bp, Homo sapiens
gaccatgatggtggcattggtgagga

SEQ ID NO: 26614 - DNA, 26 bp, Homo sapiens
accatgatggtggcattggtgaggat

SEQ ID NO: 26615 - DNA, 26 bp, Homo sapiens
ccatgatggtggcattggtgaggatc

SEQ ID NO: 26616 - DNA, 26 bp, Homo sapiens
catgatggtggcattggtgaggatct

SEQ ID NO: 26617 - DNA, 26 bp, Homo sapiens
atgatggtggcattggtgaggatctg

SEQ ID NO: 26618 - DNA, 26 bp, Homo sapiens
tgatggtggcattggtgaggatctgc

SEQ ID NO: 26619 - DNA, 26 bp, Homo sapiens
gatggtggcattggtgaggatctgct

SEQ ID NO: 26620 - DNA, 26 bp, Homo sapiens
atggtggcattggtgaggatctgctg

SEQ ID NO: 26621 - DNA, 26 bp, Homo sapiens
tggtggcattggtgaggatctgctgc

SEQ ID NO: 26622 - DNA, 26 bp, Homo sapiens
ggtggcattggtgaggatctgctgca

SEQ ID NO: 26623 - DNA, 26 bp, Homo sapiens
gtggcattggtgaggatctgctgcag

SEQ ID NO: 26624 - DNA, 26 bp, Homo sapiens
tggcattggtgaggatctgctgcagg

SEQ ID NO: 26625 - DNA, 26 bp, Homo sapiens
ggcattggtgaggatctgctgcaggt

SEQ ID NO: 26626 - DNA, 26 bp, Homo sapiens
gcattggtgaggatctgctgcaggtt

SEQ ID NO: 26627 - DNA, 26 bp, Homo sapiens
cattggtgaggatctgctgcaggttc

SEQ ID NO: 26628 - DNA, 26 bp, Homo sapiens
attggtgaggatctgctgcaggttct

SEQ ID NO: 26629 - DNA, 26 bp, Homo sapiens
ttggtgaggatctgctgcaggttctc

SEQ ID NO: 26630 - DNA, 26 bp, Homo sapiens
tggtgaggatctgctgcaggttctca

SEQ ID NO: 26631 - DNA, 26 bp, Homo sapiens
ggtgaggatctgctgcaggttctcat

SEQ ID NO: 26632 - DNA, 26 bp, Homo sapiens
gtgaggatctgctgcaggttctcatt

SEQ ID NO: 26633 - DNA, 26 bp, Homo sapiens
tgaggatctgctgcaggttctcattg

SEQ ID NO: 26634 - DNA, 26 bp, Homo sapiens
gaggatctgctgcaggttctcattgt

SEQ ID NO: 26635 - DNA, 26 bp, Homo sapiens
aggatctgctgcaggttctcattgtt

SEQ ID NO: 26636 - DNA, 26 bp, Homo sapiens
ggatctgctgcaggttctcattgttc

SEQ ID NO: 26637 - DNA, 26 bp, Homo sapiens
gatctgctgcaggttctcattgttct

SEQ ID NO: 26638 - DNA, 26 bp, Homo sapiens
atctgctgcaggttctcattgttctt

SEQ ID NO: 26639 - DNA, 26 bp, Homo sapiens
tctgctgcaggttctcattgttcttg

SEQ ID NO: 26640 - DNA, 26 bp, Homo sapiens
ctgctgcaggttctcattgttcttgc

SEQ ID NO: 26641 - DNA, 26 bp, Homo sapiens
tgctgcaggttctcattgttcttgca

SEQ ID NO: 26642 - DNA, 26 bp, Homo sapiens
gctgcaggttctcattgttcttgcac

SEQ ID NO: 26643 - DNA, 26 bp, Homo sapiens
ctgcaggttctcattgttcttgcact

SEQ ID NO: 26644 - DNA, 26 bp, Homo sapiens
tgcaggttctcattgttcttgcactt

SEQ ID NO: 26645 - DNA, 26 bp, Homo sapiens
gcaggttctcattgttcttgcacttg

SEQ ID NO: 26646 - DNA, 26 bp, Homo sapiens
caggttctcattgttcttgcacttgt

SEQ ID NO: 26647 - DNA, 26 bp, Homo sapiens
aggttctcattgttcttgcacttgtc

SEQ ID NO: 26648 - DNA, 26 bp, Homo sapiens
ggttctcattgttcttgcacttgtcc

SEQ ID NO: 26649 - DNA, 26 bp, Homo sapiens
gttctcattgttcttgcacttgtcca

SEQ ID NO: 26650 - DNA, 26 bp, Homo sapiens
ttctcattgttcttgcacttgtccag

SEQ ID NO: 26651 - DNA, 26 bp, Homo sapiens
tctcattgttcttgcacttgtccagg

SEQ ID NO: 26652 - DNA, 26 bp, Homo sapiens
ctcattgttcttgcacttgtccaggc

SEQ ID NO: 26653 - DNA, 26 bp, Homo sapiens
tcattgttcttgcacttgtccaggct

SEQ ID NO: 26654 - DNA, 26 bp, Homo sapiens
cattgttcttgcacttgtccaggctg

SEQ ID NO: 26655 - DNA, 26 bp, Homo sapiens
attgttcttgcacttgtccaggctgt

SEQ ID NO: 26656 - DNA, 26 bp, Homo sapiens
ttgttcttgcacttgtccaggctgtt

SEQ ID NO: 26657 - DNA, 26 bp, Homo sapiens
tgttcttgcacttgtccaggctgttg

SEQ ID NO: 26658 - DNA, 26 bp, Homo sapiens
gttcttgcacttgtccaggctgttgc

SEQ ID NO: 26659 - DNA, 26 bp, Homo sapiens
ttcttgcacttgtccaggctgttgcc

SEQ ID NO: 26660 - DNA, 26 bp, Homo sapiens
tcttgcacttgtccaggctgttgccc

SEQ ID NO: 26661 - DNA, 26 bp, Homo sapiens
cttgcacttgtccaggctgttgccca

SEQ ID NO: 26662 - DNA, 26 bp, Homo sapiens
ttgcacttgtccaggctgttgcccag

SEQ ID NO: 26663 - DNA, 26 bp, Homo sapiens
tgcacttgtccaggctgttgcccagc

SEQ ID NO: 26664 - DNA, 26 bp, Homo sapiens
gcacttgtccaggctgttgcccagct

SEQ ID NO: 26665 - DNA, 26 bp, Homo sapiens
cacttgtccaggctgttgcccagctc

SEQ ID NO: 26666 - DNA, 26 bp, Homo sapiens
acttgtccaggctgttgcccagctcc

SEQ ID NO: 26667 - DNA, 26 bp, Homo sapiens
cttgtccaggctgttgcccagctcct

SEQ ID NO: 26668 - DNA, 26 bp, Homo sapiens
ttgtccaggctgttgcccagctcctt

SEQ ID NO: 26669 - DNA, 26 bp, Homo sapiens
tgtccaggctgttgcccagctccttg

SEQ ID NO: 26670 - DNA, 26 bp, Homo sapiens
gtccaggctgttgcccagctccttga

SEQ ID NO: 26671 - DNA, 26 bp, Homo sapiens
tccaggctgttgcccagctccttgac

SEQ ID NO: 26672 - DNA, 26 bp, Homo sapiens
ccaggctgttgcccagctccttgacc

SEQ ID NO: 26673 - DNA, 26 bp, Homo sapiens
caggctgttgcccagctccttgaccg

SEQ ID NO: 26674 - DNA, 26 bp, Homo sapiens
aggctgttgcccagctccttgaccgt

SEQ ID NO: 26675 - DNA, 26 bp, Homo sapiens
ggctgttgcccagctccttgaccgtg

SEQ ID NO: 26676 - DNA, 26 bp, Homo sapiens
gctgttgcccagctccttgaccgtgc

SEQ ID NO: 26677 - DNA, 26 bp, Homo sapiens
ctgttgcccagctccttgaccgtgcg

SEQ ID NO: 26678 - DNA, 26 bp, Homo sapiens
tgttgcccagctccttgaccgtgcgg

SEQ ID NO: 26679 - DNA, 26 bp, Homo sapiens
gttgcccagctccttgaccgtgcgga

SEQ ID NO: 26680 - DNA, 26 bp, Homo sapiens
ttgcccagctccttgaccgtgcggat

SEQ ID NO: 26681 - DNA, 26 bp, Homo sapiens
tgcccagctccttgaccgtgcggatg

SEQ ID NO: 26682 - DNA, 26 bp, Homo sapiens
gcccagctccttgaccgtgcggatgt

SEQ ID NO: 26683 - DNA, 26 bp, Homo sapiens
cccagctccttgaccgtgcggatgta

SEQ ID NO: 26684 - DNA, 26 bp, Homo sapiens
ccagctccttgaccgtgcggatgtaa

SEQ ID NO: 26685 - DNA, 26 bp, Homo sapiens
cagctccttgaccgtgcggatgtaat

SEQ ID NO: 26686 - DNA, 26 bp, Homo sapiens
agctccttgaccgtgcggatgtaatc

SEQ ID NO: 26687 - DNA, 26 bp, Homo sapiens
gctccttgaccgtgcggatgtaatcc

SEQ ID NO: 26688 - DNA, 26 bp, Homo sapiens
ctccttgaccgtgcggatgtaatcca

SEQ ID NO: 26689 - DNA, 26 bp, Homo sapiens
tccttgaccgtgcggatgtaatccag

SEQ ID NO: 26690 - DNA, 26 bp, Homo sapiens
ccttgaccgtgcggatgtaatccagt

SEQ ID NO: 26691 - DNA, 26 bp, Homo sapiens
cttgaccgtgcggatgtaatccagtg

SEQ ID NO: 26692 - DNA, 26 bp, Homo sapiens
ttgaccgtgcggatgtaatccagtgc

SEQ ID NO: 26693 - DNA, 26 bp, Homo sapiens
tgaccgtgcggatgtaatccagtgca

SEQ ID NO: 26694 - DNA, 26 bp, Homo sapiens
gaccgtgcggatgtaatccagtgcat

SEQ ID NO: 26695 - DNA, 26 bp, Homo sapiens
accgtgcggatgtaatccagtgcatt

SEQ ID NO: 26696 - DNA, 26 bp, Homo sapiens
ccgtgcggatgtaatccagtgcattg

SEQ ID NO: 26697 - DNA, 26 bp, Homo sapiens
cgtgcggatgtaatccagtgcattgg

SEQ ID NO: 26698 - DNA, 26 bp, Homo sapiens
gtgcggatgtaatccagtgcattggg

SEQ ID NO: 26699 - DNA, 26 bp, Homo sapiens
tgcggatgtaatccagtgcattgggg

SEQ ID NO: 26700 - DNA, 26 bp, Homo sapiens
gcggatgtaatccagtgcattgggga

SEQ ID NO: 26701 - DNA, 26 bp, Homo sapiens
cggatgtaatccagtgcattggggac

SEQ ID NO: 26702 - DNA, 26 bp, Homo sapiens
ggatgtaatccagtgcattggggacc

SEQ ID NO: 26703 - DNA, 26 bp, Homo sapiens
gatgtaatccagtgcattggggacca

SEQ ID NO: 26704 - DNA, 26 bp, Homo sapiens
atgtaatccagtgcattggggaccaa

SEQ ID NO: 26705 - DNA, 26 bp, Homo sapiens
tgtaatccagtgcattggggaccaag

SEQ ID NO: 26706 - DNA, 26 bp, Homo sapiens
gtaatccagtgcattggggaccaagg

SEQ ID NO: 26707 - DNA, 26 bp, Homo sapiens
taatccagtgcattggggaccaagga

SEQ ID NO: 26708 - DNA, 26 bp, Homo sapiens
aatccagtgcattggggaccaaggac

SEQ ID NO: 26709 - DNA, 26 bp, Homo sapiens
atccagtgcattggggaccaaggact

SEQ ID NO: 26710 - DNA, 26 bp, Homo sapiens
tccagtgcattggggaccaaggactc

SEQ ID NO: 26711 - DNA, 26 bp, Homo sapiens
ccagtgcattggggaccaaggactcc

SEQ ID NO: 26712 - DNA, 26 bp, Homo sapiens
cagtgcattggggaccaaggactcca

SEQ ID NO: 26713 - DNA, 26 bp, Homo sapiens
agtgcattggggaccaaggactccag

SEQ ID NO: 26714 - DNA, 26 bp, Homo sapiens
gtgcattggggaccaaggactccagt

SEQ ID NO: 26715 - DNA, 26 bp, Homo sapiens
tgcattggggaccaaggactccagtt

SEQ ID NO: 26716 - DNA, 26 bp, Homo sapiens
gcattggggaccaaggactccagttc

SEQ ID NO: 26717 - DNA, 26 bp, Homo sapiens
cattggggaccaaggactccagttca

SEQ ID NO: 26718 - DNA, 26 bp, Homo sapiens
attggggaccaaggactccagttcag

SEQ ID NO: 26719 - DNA, 26 bp, Homo sapiens
ttggggaccaaggactccagttcagg

SEQ ID NO: 26720 - DNA, 26 bp, Homo sapiens
tggggaccaaggactccagttcaggg

SEQ ID NO: 26721 - DNA, 26 bp, Homo sapiens
ggggaccaaggactccagttcaggga

SEQ ID NO: 26722 - DNA, 26 bp, Homo sapiens
gggaccaaggactccagttcagggaa

SEQ ID NO: 26723 - DNA, 26 bp, Homo sapiens
ggaccaaggactccagttcagggaat

SEQ ID NO: 26724 - DNA, 26 bp, Homo sapiens
gaccaaggactccagttcagggaatc

SEQ ID NO: 26725 - DNA, 26 bp, Homo sapiens
accaaggactccagttcagggaatct

SEQ ID NO: 26726 - DNA, 26 bp, Homo sapiens
ccaaggactccagttcagggaatctc

SEQ ID NO: 26727 - DNA, 26 bp, Homo sapiens
caaggactccagttcagggaatctct

SEQ ID NO: 26728 - DNA, 26 bp, Homo sapiens
aaggactccagttcagggaatctctt

SEQ ID NO: 26729 - DNA, 26 bp, Homo sapiens
aggactccagttcagggaatctcttt

SEQ ID NO: 26730 - DNA, 26 bp, Homo sapiens
ggactccagttcagggaatctctttg

SEQ ID NO: 26731 - DNA, 26 bp, Homo sapiens
gactccagttcagggaatctctttga

SEQ ID NO: 26732 - DNA, 26 bp, Homo sapiens
actccagttcagggaatctctttgag

SEQ ID NO: 26733 - DNA, 26 bp, Homo sapiens
ctccagttcagggaatctctttgagt

SEQ ID NO: 26734 - DNA, 26 bp, Homo sapiens
tccagttcagggaatctctttgagta

SEQ ID NO: 26735 - DNA, 26 bp, Homo sapiens
ccagttcagggaatctctttgagtac

SEQ ID NO: 26736 - DNA, 26 bp, Homo sapiens
cagttcagggaatctctttgagtact

SEQ ID NO: 26737 - DNA, 26 bp, Homo sapiens
agttcagggaatctctttgagtactt

SEQ ID NO: 26738 - DNA, 26 bp, Homo sapiens
gttcagggaatctctttgagtactta

SEQ ID NO: 26739 - DNA, 26 bp, Homo sapiens
ttcagggaatctctttgagtacttat

SEQ ID NO: 26740 - DNA, 26 bp, Homo sapiens
tcagggaatctctttgagtacttatc

SEQ ID NO: 26741 - DNA, 26 bp, Homo sapiens
cagggaatctctttgagtacttatcc

SEQ ID NO: 26742 - DNA, 26 bp, Homo sapiens
agggaatctctttgagtacttatccc

SEQ ID NO: 26743 - DNA, 26 bp, Homo sapiens
gggaatctctttgagtacttatcccg

SEQ ID NO: 26744 - DNA, 26 bp, Homo sapiens
ggaatctctttgagtacttatcccgg

SEQ ID NO: 26745 - DNA, 26 bp, Homo sapiens
gaatctctttgagtacttatcccgga

SEQ ID NO: 26746 - DNA, 26 bp, Homo sapiens
aatctctttgagtacttatcccggat

SEQ ID NO: 26747 - DNA, 26 bp, Homo sapiens
atctctttgagtacttatcccggatg

SEQ ID NO: 26748 - DNA, 26 bp, Homo sapiens
tctctttgagtacttatcccggatga

SEQ ID NO: 26749 - DNA, 26 bp, Homo sapiens
ctctttgagtacttatcccggatgaa

SEQ ID NO: 26750 - DNA, 26 bp, Homo sapiens
tctttgagtacttatcccggatgaac

SEQ ID NO: 26751 - DNA, 26 bp, Homo sapiens
ctttgagtacttatcccggatgaact

SEQ ID NO: 26752 - DNA, 26 bp, Homo sapiens
tttgagtacttatcccggatgaactt

SEQ ID NO: 26753 - DNA, 26 bp, Homo sapiens
ttgagtacttatcccggatgaactta

SEQ ID NO: 26754 - DNA, 26 bp, Homo sapiens
tgagtacttatcccggatgaacttat

SEQ ID NO: 26755 - DNA, 26 bp, Homo sapiens
gagtacttatcccggatgaacttatg

SEQ ID NO: 26756 - DNA, 26 bp, Homo sapiens
agtacttatcccggatgaacttatgg

SEQ ID NO: 26757 - DNA, 26 bp, Homo sapiens
gtacttatcccggatgaacttatgga

SEQ ID NO: 26758 - DNA, 26 bp, Homo sapiens
tacttatcccggatgaacttatggat

SEQ ID NO: 26759 - DNA, 26 bp, Homo sapiens
acttatcccggatgaacttatggatg

SEQ ID NO: 26760 - DNA, 26 bp, Homo sapiens
cttatcccggatgaacttatggatga

SEQ ID NO: 26761 - DNA, 26 bp, Homo sapiens
ttatcccggatgaacttatggatgat

SEQ ID NO: 26762 - DNA, 26 bp, Homo sapiens
tatcccggatgaacttatggatgatg

SEQ ID NO: 26763 - DNA, 26 bp, Homo sapiens
atcccggatgaacttatggatgatgt

SEQ ID NO: 26764 - DNA, 26 bp, Homo sapiens
tcccggatgaacttatggatgatgtt

SEQ ID NO: 26765 - DNA, 26 bp, Homo sapiens
cccggatgaacttatggatgatgttc

SEQ ID NO: 26766 - DNA, 26 bp, Homo sapiens
ccggatgaacttatggatgatgttca

SEQ ID NO: 26767 - DNA, 26 bp, Homo sapiens
cggatgaacttatggatgatgttcag

SEQ ID NO: 26768 - DNA, 26 bp, Homo sapiens
ggatgaacttatggatgatgttcagc

SEQ ID NO: 26769 - DNA, 26 bp, Homo sapiens
gatgaacttatggatgatgttcagct

SEQ ID NO: 26770 - DNA, 26 bp, Homo sapiens
atgaacttatggatgatgttcagctc

SEQ ID NO: 26771 - DNA, 26 bp, Homo sapiens
tgaacttatggatgatgttcagctcg

SEQ ID NO: 26772 - DNA, 26 bp, Homo sapiens
gaacttatggatgatgttcagctcgt

SEQ ID NO: 26773 - DNA, 26 bp, Homo sapiens
aacttatggatgatgttcagctcgtt

SEQ ID NO: 26774 - DNA, 26 bp, Homo sapiens
acttatggatgatgttcagctcgttt

SEQ ID NO: 26775 - DNA, 26 bp, Homo sapiens
cttatggatgatgttcagctcgtttt

SEQ ID NO: 26776 - DNA, 26 bp, Homo sapiens
ttatggatgatgttcagctcgttttc

SEQ ID NO: 26777 - DNA, 26 bp, Homo sapiens
tatggatgatgttcagctcgttttcg

SEQ ID NO: 26778 - DNA, 26 bp, Homo sapiens
atggatgatgttcagctcgttttcga

SEQ ID NO: 26779 - DNA, 26 bp, Homo sapiens
tggatgatgttcagctcgttttcgat

SEQ ID NO: 26780 - DNA, 26 bp, Homo sapiens
ggatgatgttcagctcgttttcgatc

SEQ ID NO: 26781 - DNA, 26 bp, Homo sapiens
gatgatgttcagctcgttttcgatct

SEQ ID NO: 26782 - DNA, 26 bp, Homo sapiens
atgatgttcagctcgttttcgatctc

SEQ ID NO: 26783 - DNA, 26 bp, Homo sapiens
tgatgttcagctcgttttcgatctcc

SEQ ID NO: 26784 - DNA, 26 bp, Homo sapiens
gatgttcagctcgttttcgatctcca

SEQ ID NO: 26785 - DNA, 26 bp, Homo sapiens
atgttcagctcgttttcgatctccac

SEQ ID NO: 26786 - DNA, 26 bp, Homo sapiens
tgttcagctcgttttcgatctccacg

SEQ ID NO: 26787 - DNA, 26 bp, Homo sapiens
gttcagctcgttttcgatctccacgg

SEQ ID NO: 26788 - DNA, 26 bp, Homo sapiens
ttcagctcgttttcgatctccacggt

SEQ ID NO: 26789 - DNA, 26 bp, Homo sapiens
tcagctcgttttcgatctccacggtc

SEQ ID NO: 26790 - DNA, 26 bp, Homo sapiens
cagctcgttttcgatctccacggtca

SEQ ID NO: 26791 - DNA, 26 bp, Homo sapiens
agctcgttttcgatctccacggtcag

SEQ ID NO: 26792 - DNA, 26 bp, Homo sapiens
gctcgttttcgatctccacggtcagg

SEQ ID NO: 26793 - DNA, 26 bp, Homo sapiens
ctcgttttcgatctccacggtcaggt

SEQ ID NO: 26794 - DNA, 26 bp, Homo sapiens
tcgttttcgatctccacggtcaggtt

SEQ ID NO: 26795 - DNA, 26 bp, Homo sapiens
cgttttcgatctccacggtcaggttg

SEQ ID NO: 26796 - DNA, 26 bp, Homo sapiens
gttttcgatctccacggtcaggttgt

SEQ ID NO: 26797 - DNA, 26 bp, Homo sapiens
ttttcgatctccacggtcaggttgtt

SEQ ID NO: 26798 - DNA, 26 bp, Homo sapiens
tttcgatctccacggtcaggttgttg

SEQ ID NO: 26799 - DNA, 26 bp, Homo sapiens
ttcgatctccacggtcaggttgttgg

SEQ ID NO: 26800 - DNA, 26 bp, Homo sapiens
tcgatctccacggtcaggttgttggc

SEQ ID NO: 26801 - DNA, 26 bp, Homo sapiens
cgatctccacggtcaggttgttggca

SEQ ID NO: 26802 - DNA, 26 bp, Homo sapiens
gatctccacggtcaggttgttggcat

SEQ ID NO: 26803 - DNA, 26 bp, Homo sapiens
atctccacggtcaggttgttggcatc

SEQ ID NO: 26804 - DNA, 26 bp, Homo sapiens
tctccacggtcaggttgttggcatcc

SEQ ID NO: 26805 - DNA, 26 bp, Homo sapiens
ctccacggtcaggttgttggcatcca

SEQ ID NO: 26806 - DNA, 26 bp, Homo sapiens
tccacggtcaggttgttggcatccac

SEQ ID NO: 26807 - DNA, 26 bp, Homo sapiens
ccacggtcaggttgttggcatccacg

SEQ ID NO: 26808 - DNA, 26 bp, Homo sapiens
cacggtcaggttgttggcatccacga

SEQ ID NO: 26809 - DNA, 26 bp, Homo sapiens
acggtcaggttgttggcatccacgat

SEQ ID NO: 26810 - DNA, 26 bp, Homo sapiens
cggtcaggttgttggcatccacgatg

SEQ ID NO: 26811 - DNA, 26 bp, Homo sapiens
ggtcaggttgttggcatccacgatga

SEQ ID NO: 26812 - DNA, 26 bp, Homo sapiens
gtcaggttgttggcatccacgatgac

SEQ ID NO: 26813 - DNA, 26 bp, Homo sapiens
tcaggttgttggcatccacgatgacg

SEQ ID NO: 26814 - DNA, 26 bp, Homo sapiens
caggttgttggcatccacgatgacgc

SEQ ID NO: 26815 - DNA, 26 bp, Homo sapiens
aggttgttggcatccacgatgacgcg

SEQ ID NO: 26816 - DNA, 26 bp, Homo sapiens
ggttgttggcatccacgatgacgcgg

SEQ ID NO: 26817 - DNA, 26 bp, Homo sapiens
gttgttggcatccacgatgacgcggt

SEQ ID NO: 26818 - DNA, 26 bp, Homo sapiens
ttgttggcatccacgatgacgcggta

SEQ ID NO: 26819 - DNA, 26 bp, Homo sapiens
tgttggcatccacgatgacgcggtat

SEQ ID NO: 26820 - DNA, 26 bp, Homo sapiens
gttggcatccacgatgacgcggtatt

SEQ ID NO: 26821 - DNA, 26 bp, Homo sapiens
ttggcatccacgatgacgcggtattc

SEQ ID NO: 26822 - DNA, 26 bp, Homo sapiens
tggcatccacgatgacgcggtattca

SEQ ID NO: 26823 - DNA, 26 bp, Homo sapiens
ggcatccacgatgacgcggtattcag

SEQ ID NO: 26824 - DNA, 26 bp, Homo sapiens
gcatccacgatgacgcggtattcagg

SEQ ID NO: 26825 - DNA, 26 bp, Homo sapiens
catccacgatgacgcggtattcaggc

SEQ ID NO: 26826 - DNA, 26 bp, Homo sapiens
atccacgatgacgcggtattcaggcg

SEQ ID NO: 26827 - DNA, 26 bp, Homo sapiens
tccacgatgacgcggtattcaggcgc

SEQ ID NO: 26828 - DNA, 26 bp, Homo sapiens
ccacgatgacgcggtattcaggcgcg

SEQ ID NO: 26829 - DNA, 26 bp, Homo sapiens
cacgatgacgcggtattcaggcgcgg

SEQ ID NO: 26830 - DNA, 26 bp, Homo sapiens
acgatgacgcggtattcaggcgcggc

SEQ ID NO: 26831 - DNA, 26 bp, Homo sapiens
cgatgacgcggtattcaggcgcggcc

SEQ ID NO: 26832 - DNA, 26 bp, Homo sapiens
gatgacgcggtattcaggcgcggcct

SEQ ID NO: 26833 - DNA, 26 bp, Homo sapiens
atgacgcggtattcaggcgcggcctc

SEQ ID NO: 26834 - DNA, 26 bp, Homo sapiens
tgacgcggtattcaggcgcggcctcc

SEQ ID NO: 26835 - DNA, 26 bp, Homo sapiens
gacgcggtattcaggcgcggcctcca

SEQ ID NO: 26836 - DNA, 26 bp, Homo sapiens
acgcggtattcaggcgcggcctccac

SEQ ID NO: 26837 - DNA, 26 bp, Homo sapiens
cgcggtattcaggcgcggcctccact

SEQ ID NO: 26838 - DNA, 26 bp, Homo sapiens
gcggtattcaggcgcggcctccactg

SEQ ID NO: 26839 - DNA, 26 bp, Homo sapiens
cggtattcaggcgcggcctccactgg

SEQ ID NO: 26840 - DNA, 26 bp, Homo sapiens
ggtattcaggcgcggcctccactggt

SEQ ID NO: 26841 - DNA, 26 bp, Homo sapiens
gtattcaggcgcggcctccactggtc

SEQ ID NO: 26842 - DNA, 26 bp, Homo sapiens
tattcaggcgcggcctccactggtcc

SEQ ID NO: 26843 - DNA, 26 bp, Homo sapiens
attcaggcgcggcctccactggtccc

SEQ ID NO: 26844 - DNA, 26 bp, Homo sapiens
ttcaggcgcggcctccactggtccca

SEQ ID NO: 26845 - DNA, 26 bp, Homo sapiens
tcaggcgcggcctccactggtcccat

SEQ ID NO: 26846 - DNA, 26 bp, Homo sapiens
caggcgcggcctccactggtcccatc

SEQ ID NO: 26847 - DNA, 26 bp, Homo sapiens
aggcgcggcctccactggtcccatca

SEQ ID NO: 26848 - DNA, 26 bp, Homo sapiens
ggcgcggcctccactggtcccatcac

SEQ ID NO: 26849 - DNA, 26 bp, Homo sapiens
gcgcggcctccactggtcccatcact

SEQ ID NO: 26850 - DNA, 26 bp, Homo sapiens
cgcggcctccactggtcccatcactt

SEQ ID NO: 26851 - DNA, 26 bp, Homo sapiens
gcggcctccactggtcccatcacttc

SEQ ID NO: 26852 - DNA, 26 bp, Homo sapiens
cggcctccactggtcccatcacttct

SEQ ID NO: 26853 - DNA, 26 bp, Homo sapiens
ggcctccactggtcccatcacttctg

SEQ ID NO: 26854 - DNA, 26 bp, Homo sapiens
gcctccactggtcccatcacttctga

SEQ ID NO: 26855 - DNA, 26 bp, Homo sapiens
cctccactggtcccatcacttctgaa

SEQ ID NO: 26856 - DNA, 26 bp, Homo sapiens
ctccactggtcccatcacttctgaag

SEQ ID NO: 26857 - DNA, 26 bp, Homo sapiens
tccactggtcccatcacttctgaagc

SEQ ID NO: 26858 - DNA, 26 bp, Homo sapiens
ccactggtcccatcacttctgaagct

SEQ ID NO: 26859 - DNA, 26 bp, Homo sapiens
cactggtcccatcacttctgaagctt

SEQ ID NO: 26860 - DNA, 26 bp, Homo sapiens
actggtcccatcacttctgaagcttt

SEQ ID NO: 26861 - DNA, 26 bp, Homo sapiens
ctggtcccatcacttctgaagctttg

SEQ ID NO: 26862 - DNA, 26 bp, Homo sapiens
tggtcccatcacttctgaagctttgg

SEQ ID NO: 26863 - DNA, 26 bp, Homo sapiens
ggtcccatcacttctgaagctttggc

SEQ ID NO: 26864 - DNA, 26 bp, Homo sapiens
gtcccatcacttctgaagctttggct

SEQ ID NO: 26865 - DNA, 26 bp, Homo sapiens
tcccatcacttctgaagctttggctt

SEQ ID NO: 26866 - DNA, 26 bp, Homo sapiens
cccatcacttctgaagctttggcttg

SEQ ID NO: 26867 - DNA, 26 bp, Homo sapiens
ccatcacttctgaagctttggcttgc

SEQ ID NO: 26868 - DNA, 26 bp, Homo sapiens
catcacttctgaagctttggcttgct

SEQ ID NO: 26869 - DNA, 26 bp, Homo sapiens
atcacttctgaagctttggcttgctt

SEQ ID NO: 26870 - DNA, 26 bp, Homo sapiens
tcacttctgaagctttggcttgcttg

SEQ ID NO: 26871 - DNA, 26 bp, Homo sapiens
cacttctgaagctttggcttgcttgc

SEQ ID NO: 26872 - DNA, 26 bp, Homo sapiens
acttctgaagctttggcttgcttgct

SEQ ID NO: 26873 - DNA, 26 bp, Homo sapiens
cttctgaagctttggcttgcttgctg

SEQ ID NO: 26874 - DNA, 26 bp, Homo sapiens
ttctgaagctttggcttgcttgctga

SEQ ID NO: 26875 - DNA, 26 bp, Homo sapiens
tctgaagctttggcttgcttgctgat

SEQ ID NO: 26876 - DNA, 26 bp, Homo sapiens
ctgaagctttggcttgcttgctgata

SEQ ID NO: 26877 - DNA, 26 bp, Homo sapiens
tgaagctttggcttgcttgctgatat

SEQ ID NO: 26878 - DNA, 26 bp, Homo sapiens
gaagctttggcttgcttgctgatata

SEQ ID NO: 26879 - DNA, 26 bp, Homo sapiens
aagctttggcttgcttgctgatatac

SEQ ID NO: 26880 - DNA, 26 bp, Homo sapiens
agctttggcttgcttgctgatatact

SEQ ID NO: 26881 - DNA, 26 bp, Homo sapiens
gctttggcttgcttgctgatatactc

SEQ ID NO: 26882 - DNA, 26 bp, Homo sapiens
ctttggcttgcttgctgatatactcc

SEQ ID NO: 26883 - DNA, 26 bp, Homo sapiens
tttggcttgcttgctgatatactcct

SEQ ID NO: 26884 - DNA, 26 bp, Homo sapiens
ttggcttgcttgctgatatactcctc

SEQ ID NO: 26885 - DNA, 26 bp, Homo sapiens
tggcttgcttgctgatatactcctca

SEQ ID NO: 26886 - DNA, 26 bp, Homo sapiens
ggcttgcttgctgatatactcctcaa

SEQ ID NO: 26887 - DNA, 26 bp, Homo sapiens
gcttgcttgctgatatactcctcaat

SEQ ID NO: 26888 - DNA, 26 bp, Homo sapiens
cttgcttgctgatatactcctcaatc

SEQ ID NO: 26889 - DNA, 26 bp, Homo sapiens
ttgcttgctgatatactcctcaatct

SEQ ID NO: 26890 - DNA, 26 bp, Homo sapiens
tgcttgctgatatactcctcaatctt

SEQ ID NO: 26891 - DNA, 26 bp, Homo sapiens
gcttgctgatatactcctcaatcttc

SEQ ID NO: 26892 - DNA, 26 bp, Homo sapiens
cttgctgatatactcctcaatcttca

SEQ ID NO: 26893 - DNA, 26 bp, Homo sapiens
ttgctgatatactcctcaatcttcat

SEQ ID NO: 26894 - DNA, 26 bp, Homo sapiens
tgctgatatactcctcaatcttcatc

SEQ ID NO: 26895 - DNA, 26 bp, Homo sapiens
gctgatatactcctcaatcttcatca

SEQ ID NO: 26896 - DNA, 26 bp, Homo sapiens
ctgatatactcctcaatcttcatcat

SEQ ID NO: 26897 - DNA, 26 bp, Homo sapiens
tgatatactcctcaatcttcatcata

SEQ ID NO: 26898 - DNA, 26 bp, Homo sapiens
gatatactcctcaatcttcatcataa

SEQ ID NO: 26899 - DNA, 26 bp, Homo sapiens
atatactcctcaatcttcatcataat

SEQ ID NO: 26900 - DNA, 26 bp, Homo sapiens
tatactcctcaatcttcatcataatc

SEQ ID NO: 26901 - DNA, 26 bp, Homo sapiens
atactcctcaatcttcatcataatct

SEQ ID NO: 26902 - DNA, 26 bp, Homo sapiens
tactcctcaatcttcatcataatctc

SEQ ID NO: 26903 - DNA, 26 bp, Homo sapiens
actcctcaatcttcatcataatctca

SEQ ID NO: 26904 - DNA, 26 bp, Homo sapiens
ctcctcaatcttcatcataatctcag

SEQ ID NO: 26905 - DNA, 26 bp, Homo sapiens
tcctcaatcttcatcataatctcagc

SEQ ID NO: 26906 - DNA, 26 bp, Homo sapiens
cctcaatcttcatcataatctcagca

SEQ ID NO: 26907 - DNA, 26 bp, Homo sapiens
ctcaatcttcatcataatctcagcaa

SEQ ID NO: 26908 - DNA, 26 bp, Homo sapiens
tcaatcttcatcataatctcagcaaa

SEQ ID NO: 26909 - DNA, 26 bp, Homo sapiens
caatcttcatcataatctcagcaaac

SEQ ID NO: 26910 - DNA, 26 bp, Homo sapiens
aatcttcatcataatctcagcaaaca

SEQ ID NO: 26911 - DNA, 26 bp, Homo sapiens
atcttcatcataatctcagcaaacat

SEQ ID NO: 26912 - DNA, 26 bp, Homo sapiens
tcttcatcataatctcagcaaacatc

SEQ ID NO: 26913 - DNA, 26 bp, Homo sapiens
cttcatcataatctcagcaaacatct

SEQ ID NO: 26914 - DNA, 26 bp, Homo sapiens
ttcatcataatctcagcaaacatctt

SEQ ID NO: 26915 - DNA, 26 bp, Homo sapiens
tcatcataatctcagcaaacatctta

SEQ ID NO: 26916 - DNA, 26 bp, Homo sapiens
catcataatctcagcaaacatcttac

SEQ ID NO: 26917 - DNA, 26 bp, Homo sapiens
atcataatctcagcaaacatcttact

SEQ ID NO: 26918 - DNA, 26 bp, Homo sapiens
tcataatctcagcaaacatcttacta

SEQ ID NO: 26919 - DNA, 26 bp, Homo sapiens
cataatctcagcaaacatcttactat

SEQ ID NO: 26920 - DNA, 26 bp, Homo sapiens
ataatctcagcaaacatcttactatc

SEQ ID NO: 26921 - DNA, 26 bp, Homo sapiens
taatctcagcaaacatcttactatcc

SEQ ID NO: 26922 - DNA, 26 bp, Homo sapiens
aatctcagcaaacatcttactatccc

SEQ ID NO: 26923 - DNA, 26 bp, Homo sapiens
atctcagcaaacatcttactatccca

SEQ ID NO: 26924 - DNA, 26 bp, Homo sapiens
tctcagcaaacatcttactatcccat

SEQ ID NO: 26925 - DNA, 26 bp, Homo sapiens
ctcagcaaacatcttactatcccata

SEQ ID NO: 26926 - DNA, 26 bp, Homo sapiens
tcagcaaacatcttactatcccatag

SEQ ID NO: 26927 - DNA, 26 bp, Homo sapiens
cagcaaacatcttactatcccatagc

SEQ ID NO: 26928 - DNA, 26 bp, Homo sapiens
agcaaacatcttactatcccatagct

SEQ ID NO: 26929 - DNA, 26 bp, Homo sapiens
gcaaacatcttactatcccatagctt

SEQ ID NO: 26930 - DNA, 26 bp, Homo sapiens
caaacatcttactatcccatagcttg

SEQ ID NO: 26931 - DNA, 26 bp, Homo sapiens
aaacatcttactatcccatagcttgg

SEQ ID NO: 26932 - DNA, 26 bp, Homo sapiens
aacatcttactatcccatagcttggc

SEQ ID NO: 26933 - DNA, 26 bp, Homo sapiens
acatcttactatcccatagcttggcg

SEQ ID NO: 26934 - DNA, 26 bp, Homo sapiens
catcttactatcccatagcttggcga

SEQ ID NO: 26935 - DNA, 26 bp, Homo sapiens
atcttactatcccatagcttggcgat

SEQ ID NO: 26936 - DNA, 26 bp, Homo sapiens
tcttactatcccatagcttggcgatg

SEQ ID NO: 26937 - DNA, 26 bp, Homo sapiens
cttactatcccatagcttggcgatgg

SEQ ID NO: 26938 - DNA, 26 bp, Homo sapiens
ttactatcccatagcttggcgatggt

SEQ ID NO: 26939 - DNA, 26 bp, Homo sapiens
tactatcccatagcttggcgatggtc

SEQ ID NO: 26940 - DNA, 26 bp, Homo sapiens
actatcccatagcttggcgatggtct

SEQ ID NO: 26941 - DNA, 26 bp, Homo sapiens
ctatcccatagcttggcgatggtctt

SEQ ID NO: 26942 - DNA, 26 bp, Homo sapiens
tatcccatagcttggcgatggtcttg

SEQ ID NO: 26943 - DNA, 26 bp, Homo sapiens
atcccatagcttggcgatggtcttga

SEQ ID NO: 26944 - DNA, 26 bp, Homo sapiens
tcccatagcttggcgatggtcttgac

SEQ ID NO: 26945 - DNA, 26 bp, Homo sapiens
cccatagcttggcgatggtcttgact

SEQ ID NO: 26946 - DNA, 26 bp, Homo sapiens
ccatagcttggcgatggtcttgactg

SEQ ID NO: 26947 - DNA, 26 bp, Homo sapiens
catagcttggcgatggtcttgactga

SEQ ID NO: 26948 - DNA, 26 bp, Homo sapiens
atagcttggcgatggtcttgactgaa

SEQ ID NO: 26949 - DNA, 26 bp, Homo sapiens
tagcttggcgatggtcttgactgaat

SEQ ID NO: 26950 - DNA, 26 bp, Homo sapiens
agcttggcgatggtcttgactgaatc

SEQ ID NO: 26951 - DNA, 26 bp, Homo sapiens
gcttggcgatggtcttgactgaatcc

SEQ ID NO: 26952 - DNA, 26 bp, Homo sapiens
cttggcgatggtcttgactgaatccc

SEQ ID NO: 26953 - DNA, 26 bp, Homo sapiens
ttggcgatggtcttgactgaatcccc

SEQ ID NO: 26954 - DNA, 26 bp, Homo sapiens
tggcgatggtcttgactgaatccccg

SEQ ID NO: 26955 - DNA, 26 bp, Homo sapiens
ggcgatggtcttgactgaatccccgg

SEQ ID NO: 26956 - DNA, 26 bp, Homo sapiens
gcgatggtcttgactgaatccccgga

SEQ ID NO: 26957 - DNA, 26 bp, Homo sapiens
cgatggtcttgactgaatccccggaa

SEQ ID NO: 26958 - DNA, 26 bp, Homo sapiens
gatggtcttgactgaatccccggaaa

SEQ ID NO: 26959 - DNA, 26 bp, Homo sapiens
atggtcttgactgaatccccggaaag

SEQ ID NO: 26960 - DNA, 26 bp, Homo sapiens
tggtcttgactgaatccccggaaaga

SEQ ID NO: 26961 - DNA, 26 bp, Homo sapiens
ggtcttgactgaatccccggaaagat

SEQ ID NO: 26962 - DNA, 26 bp, Homo sapiens
gtcttgactgaatccccggaaagatc

SEQ ID NO: 26963 - DNA, 26 bp, Homo sapiens
tcttgactgaatccccggaaagatcc

SEQ ID NO: 26964 - DNA, 26 bp, Homo sapiens
cttgactgaatccccggaaagatcca

SEQ ID NO: 26965 - DNA, 26 bp, Homo sapiens
ttgactgaatccccggaaagatccag

SEQ ID NO: 26966 - DNA, 26 bp, Homo sapiens
tgactgaatccccggaaagatccagc

SEQ ID NO: 26967 - DNA, 26 bp, Homo sapiens
gactgaatccccggaaagatccagct

SEQ ID NO: 26968 - DNA, 26 bp, Homo sapiens
actgaatccccggaaagatccagctg

SEQ ID NO: 26969 - DNA, 26 bp, Homo sapiens
ctgaatccccggaaagatccagctgt

SEQ ID NO: 26970 - DNA, 26 bp, Homo sapiens
tgaatccccggaaagatccagctgtg

SEQ ID NO: 26971 - DNA, 26 bp, Homo sapiens
gaatccccggaaagatccagctgtgt

SEQ ID NO: 26972 - DNA, 26 bp, Homo sapiens
aatccccggaaagatccagctgtgtc

SEQ ID NO: 26973 - DNA, 26 bp, Homo sapiens
atccccggaaagatccagctgtgtct

SEQ ID NO: 26974 - DNA, 26 bp, Homo sapiens
tccccggaaagatccagctgtgtctc

SEQ ID NO: 26975 - DNA, 26 bp, Homo sapiens
ccccggaaagatccagctgtgtctcc

SEQ ID NO: 26976 - DNA, 26 bp, Homo sapiens
cccggaaagatccagctgtgtctcct

SEQ ID NO: 26977 - DNA, 26 bp, Homo sapiens
ccggaaagatccagctgtgtctcctc

SEQ ID NO: 26978 - DNA, 26 bp, Homo sapiens
cggaaagatccagctgtgtctcctcc

SEQ ID NO: 26979 - DNA, 26 bp, Homo sapiens
ggaaagatccagctgtgtctcctcct

SEQ ID NO: 26980 - DNA, 26 bp, Homo sapiens
gaaagatccagctgtgtctcctcctg

SEQ ID NO: 26981 - DNA, 26 bp, Homo sapiens
aaagatccagctgtgtctcctcctgc

SEQ ID NO: 26982 - DNA, 26 bp, Homo sapiens
aagatccagctgtgtctcctcctgca

SEQ ID NO: 26983 - DNA, 26 bp, Homo sapiens
agatccagctgtgtctcctcctgcac

SEQ ID NO: 26984 - DNA, 26 bp, Homo sapiens
gatccagctgtgtctcctcctgcaca

SEQ ID NO: 26985 - DNA, 26 bp, Homo sapiens
atccagctgtgtctcctcctgcacat

SEQ ID NO: 26986 - DNA, 26 bp, Homo sapiens
tccagctgtgtctcctcctgcacatc

SEQ ID NO: 26987 - DNA, 26 bp, Homo sapiens
ccagctgtgtctcctcctgcacatcc

SEQ ID NO: 26988 - DNA, 26 bp, Homo sapiens
cagctgtgtctcctcctgcacatcct

SEQ ID NO: 26989 - DNA, 26 bp, Homo sapiens
agctgtgtctcctcctgcacatcctc

SEQ ID NO: 26990 - DNA, 26 bp, Homo sapiens
gctgtgtctcctcctgcacatcctcg

SEQ ID NO: 26991 - DNA, 26 bp, Homo sapiens
ctgtgtctcctcctgcacatcctcga

SEQ ID NO: 26992 - DNA, 26 bp, Homo sapiens
tgtgtctcctcctgcacatcctcgat

SEQ ID NO: 26993 - DNA, 26 bp, Homo sapiens
gtgtctcctcctgcacatcctcgatc

SEQ ID NO: 26994 - DNA, 26 bp, Homo sapiens
tgtctcctcctgcacatcctcgatcg

SEQ ID NO: 26995 - DNA, 26 bp, Homo sapiens
gtctcctcctgcacatcctcgatcgc

SEQ ID NO: 26996 - DNA, 26 bp, Homo sapiens
tctcctcctgcacatcctcgatcgct

SEQ ID NO: 26997 - DNA, 26 bp, Homo sapiens
ctcctcctgcacatcctcgatcgctg

SEQ ID NO: 26998 - DNA, 26 bp, Homo sapiens
tcctcctgcacatcctcgatcgctgg

SEQ ID NO: 26999 - DNA, 26 bp, Homo sapiens
cctcctgcacatcctcgatcgctggc

SEQ ID NO: 27000 - DNA, 26 bp, Homo sapiens
ctcctgcacatcctcgatcgctggct

SEQ ID NO: 27001 - DNA, 26 bp, Homo sapiens
tcctgcacatcctcgatcgctggctc

SEQ ID NO: 27002 - DNA, 26 bp, Homo sapiens
cctgcacatcctcgatcgctggctcc

SEQ ID NO: 27003 - DNA, 26 bp, Homo sapiens
ctgcacatcctcgatcgctggctcct

SEQ ID NO: 27004 - DNA, 26 bp, Homo sapiens
tgcacatcctcgatcgctggctcctc

SEQ ID NO: 27005 - DNA, 26 bp, Homo sapiens
gcacatcctcgatcgctggctcctct

SEQ ID NO: 27006 - DNA, 26 bp, Homo sapiens
cacatcctcgatcgctggctcctctt

SEQ ID NO: 27007 - DNA, 26 bp, Homo sapiens
acatcctcgatcgctggctcctcttc

SEQ ID NO: 27008 - DNA, 26 bp, Homo sapiens
catcctcgatcgctggctcctcttct

SEQ ID NO: 27009 - DNA, 26 bp, Homo sapiens
atcctcgatcgctggctcctcttctt

SEQ ID NO: 27010 - DNA, 26 bp, Homo sapiens
tcctcgatcgctggctcctcttcttc

SEQ ID NO: 27011 - DNA, 26 bp, Homo sapiens
cctcgatcgctggctcctcttcttcc

SEQ ID NO: 27012 - DNA, 26 bp, Homo sapiens
ctcgatcgctggctcctcttcttcct

SEQ ID NO: 27013 - DNA, 26 bp, Homo sapiens
tcgatcgctggctcctcttcttcctc

SEQ ID NO: 27014 - DNA, 26 bp, Homo sapiens
cgatcgctggctcctcttcttcctcc

SEQ ID NO: 27015 - DNA, 26 bp, Homo sapiens
gatcgctggctcctcttcttcctccc

SEQ ID NO: 27016 - DNA, 26 bp, Homo sapiens
atcgctggctcctcttcttcctcccc

SEQ ID NO: 27017 - DNA, 26 bp, Homo sapiens
tcgctggctcctcttcttcctcccca

SEQ ID NO: 27018 - DNA, 26 bp, Homo sapiens
cgctggctcctcttcttcctccccat

SEQ ID NO: 27019 - DNA, 26 bp, Homo sapiens
gctggctcctcttcttcctccccata

SEQ ID NO: 27020 - DNA, 26 bp, Homo sapiens
ctggctcctcttcttcctccccatag

SEQ ID NO: 27021 - DNA, 26 bp, Homo sapiens
tggctcctcttcttcctccccatagc

SEQ ID NO: 27022 - DNA, 26 bp, Homo sapiens
ggctcctcttcttcctccccatagct

SEQ ID NO: 27023 - DNA, 26 bp, Homo sapiens
gctcctcttcttcctccccatagctt

SEQ ID NO: 27024 - DNA, 26 bp, Homo sapiens
ctcctcttcttcctccccatagcttc

SEQ ID NO: 27025 - DNA, 26 bp, Homo sapiens
tcctcttcttcctccccatagcttcc

SEQ ID NO: 27026 - DNA, 26 bp, Homo sapiens
cctcttcttcctccccatagcttcct

SEQ ID NO: 27027 - DNA, 26 bp, Homo sapiens
ctcttcttcctccccatagcttcctc

SEQ ID NO: 27028 - DNA, 26 bp, Homo sapiens
tcttcttcctccccatagcttcctcc

SEQ ID NO: 27029 - DNA, 26 bp, Homo sapiens
cttcttcctccccatagcttcctcct

SEQ ID NO: 27030 - DNA, 26 bp, Homo sapiens
ttcttcctccccatagcttcctcctt

SEQ ID NO: 27031 - DNA, 26 bp, Homo sapiens
tcttcctccccatagcttcctccttc

SEQ ID NO: 27032 - DNA, 26 bp, Homo sapiens
cttcctccccatagcttcctccttcc

SEQ ID NO: 27033 - DNA, 26 bp, Homo sapiens
ttcctccccatagcttcctccttcct

SEQ ID NO: 27034 - DNA, 26 bp, Homo sapiens
tcctccccatagcttcctccttcctc

SEQ ID NO: 27035 - DNA, 26 bp, Homo sapiens
cctccccatagcttcctccttcctcc

SEQ ID NO: 27036 - DNA, 26 bp, Homo sapiens
ctccccatagcttcctccttcctcct

SEQ ID NO: 27037 - DNA, 26 bp, Homo sapiens
tccccatagcttcctccttcctcctc

SEQ ID NO: 27038 - DNA, 26 bp, Homo sapiens
ccccatagcttcctccttcctcctct

SEQ ID NO: 27039 - DNA, 26 bp, Homo sapiens
cccatagcttcctccttcctcctctt

SEQ ID NO: 27040 - DNA, 26 bp, Homo sapiens
ccatagcttcctccttcctcctcttc

SEQ ID NO: 27041 - DNA, 26 bp, Homo sapiens
catagcttcctccttcctcctcttct

SEQ ID NO: 27042 - DNA, 26 bp, Homo sapiens
atagcttcctccttcctcctcttctg

SEQ ID NO: 27043 - DNA, 26 bp, Homo sapiens
tagcttcctccttcctcctcttctgc

SEQ ID NO: 27044 - DNA, 26 bp, Homo sapiens
agcttcctccttcctcctcttctgct

SEQ ID NO: 27045 - DNA, 26 bp, Homo sapiens
gcttcctccttcctcctcttctgctg

SEQ ID NO: 27046 - DNA, 26 bp, Homo sapiens
cttcctccttcctcctcttctgctgc

SEQ ID NO: 27047 - DNA, 26 bp, Homo sapiens
ttcctccttcctcctcttctgctgcc

SEQ ID NO: 27048 - DNA, 26 bp, Homo sapiens
tcctccttcctcctcttctgctgcct

SEQ ID NO: 27049 - DNA, 26 bp, Homo sapiens
cctccttcctcctcttctgctgcctc

SEQ ID NO: 27050 - DNA, 26 bp, Homo sapiens
ctccttcctcctcttctgctgcctct

SEQ ID NO: 27051 - DNA, 26 bp, Homo sapiens
tccttcctcctcttctgctgcctctt

SEQ ID NO: 27052 - DNA, 26 bp, Homo sapiens
ccttcctcctcttctgctgcctcttc

SEQ ID NO: 27053 - DNA, 26 bp, Homo sapiens
cttcctcctcttctgctgcctcttcg

SEQ ID NO: 27054 - DNA, 26 bp, Homo sapiens
ttcctcctcttctgctgcctcttcga

SEQ ID NO: 27055 - DNA, 26 bp, Homo sapiens
tcctcctcttctgctgcctcttcgag

SEQ ID NO: 27056 - DNA, 26 bp, Homo sapiens
cctcctcttctgctgcctcttcgaga

SEQ ID NO: 27057 - DNA, 26 bp, Homo sapiens
ctcctcttctgctgcctcttcgagat

SEQ ID NO: 27058 - DNA, 26 bp, Homo sapiens
tcctcttctgctgcctcttcgagatc

SEQ ID NO: 27059 - DNA, 26 bp, Homo sapiens
cctcttctgctgcctcttcgagatca

SEQ ID NO: 27060 - DNA, 26 bp, Homo sapiens
ctcttctgctgcctcttcgagatcag

SEQ ID NO: 27061 - DNA, 26 bp, Homo sapiens
tcttctgctgcctcttcgagatcagc

SEQ ID NO: 27062 - DNA, 26 bp, Homo sapiens
cttctgctgcctcttcgagatcagct

SEQ ID NO: 27063 - DNA, 26 bp, Homo sapiens
ttctgctgcctcttcgagatcagcta

SEQ ID NO: 27064 - DNA, 26 bp, Homo sapiens
tctgctgcctcttcgagatcagctaa

SEQ ID NO: 27065 - DNA, 26 bp, Homo sapiens
ctgctgcctcttcgagatcagctaag

SEQ ID NO: 27066 - DNA, 26 bp, Homo sapiens
tgctgcctcttcgagatcagctaaga

SEQ ID NO: 27067 - DNA, 26 bp, Homo sapiens
gctgcctcttcgagatcagctaagag

SEQ ID NO: 27068 - DNA, 26 bp, Homo sapiens
ctgcctcttcgagatcagctaagagc

SEQ ID NO: 27069 - DNA, 26 bp, Homo sapiens
tgcctcttcgagatcagctaagagct

SEQ ID NO: 27070 - DNA, 26 bp, Homo sapiens
gcctcttcgagatcagctaagagctc

SEQ ID NO: 27071 - DNA, 26 bp, Homo sapiens
cctcttcgagatcagctaagagctca

SEQ ID NO: 27072 - DNA, 26 bp, Homo sapiens
ctcttcgagatcagctaagagctcat

SEQ ID NO: 27073 - DNA, 26 bp, Homo sapiens
tcttcgagatcagctaagagctcatc

SEQ ID NO: 27074 - DNA, 26 bp, Homo sapiens
cttcgagatcagctaagagctcatct

SEQ ID NO: 27075 - DNA, 26 bp, Homo sapiens
ttcgagatcagctaagagctcatctg

SEQ ID NO: 27076 - DNA, 26 bp, Homo sapiens
tcgagatcagctaagagctcatctgc

SEQ ID NO: 27077 - DNA, 26 bp, Homo sapiens
cgagatcagctaagagctcatctgcc

SEQ ID NO: 27078 - DNA, 26 bp, Homo sapiens
gagatcagctaagagctcatctgcca

SEQ ID NO: 27079 - DNA, 26 bp, Homo sapiens
agatcagctaagagctcatctgccag

SEQ ID NO: 27080 - DNA, 26 bp, Homo sapiens
gatcagctaagagctcatctgccaga

SEQ ID NO: 27081 - DNA, 26 bp, Homo sapiens
atcagctaagagctcatctgccagag

SEQ ID NO: 27082 - DNA, 26 bp, Homo sapiens
tcagctaagagctcatctgccagaga

SEQ ID NO: 27083 - DNA, 26 bp, Homo sapiens
cagctaagagctcatctgccagagac

SEQ ID NO: 27084 - DNA, 26 bp, Homo sapiens
agctaagagctcatctgccagagaca

SEQ ID NO: 27085 - DNA, 26 bp, Homo sapiens
gctaagagctcatctgccagagacat

SEQ ID NO: 27086 - DNA, 26 bp, Homo sapiens
ctaagagctcatctgccagagacatc

SEQ ID NO: 27087 - DNA, 26 bp, Homo sapiens
taagagctcatctgccagagacatcc

SEQ ID NO: 27088 - DNA, 26 bp, Homo sapiens
aagagctcatctgccagagacatccc

SEQ ID NO: 27089 - DNA, 26 bp, Homo sapiens
agagctcatctgccagagacatcccg

SEQ ID NO: 27090 - DNA, 26 bp, Homo sapiens
gagctcatctgccagagacatcccga

SEQ ID NO: 27091 - DNA, 26 bp, Homo sapiens
agctcatctgccagagacatcccgag

SEQ ID NO: 27092 - DNA, 26 bp, Homo sapiens
gctcatctgccagagacatcccgagg

SEQ ID NO: 27093 - DNA, 26 bp, Homo sapiens
ctcatctgccagagacatcccgaggc

SEQ ID NO: 27094 - DNA, 26 bp, Homo sapiens
tcatctgccagagacatcccgaggcc

SEQ ID NO: 27095 - DNA, 26 bp, Homo sapiens
catctgccagagacatcccgaggcct

SEQ ID NO: 27096 - DNA, 26 bp, Homo sapiens
atctgccagagacatcccgaggcctc

SEQ ID NO: 27097 - DNA, 26 bp, Homo sapiens
tctgccagagacatcccgaggcctct

SEQ ID NO: 27098 - DNA, 26 bp, Homo sapiens
ctgccagagacatcccgaggcctctc

SEQ ID NO: 27099 - DNA, 26 bp, Homo sapiens
tgccagagacatcccgaggcctctcc

SEQ ID NO: 27100 - DNA, 26 bp, Homo sapiens
gccagagacatcccgaggcctctcct

SEQ ID NO: 27101 - DNA, 26 bp, Homo sapiens
ccagagacatcccgaggcctctcctc

SEQ ID NO: 27102 - DNA, 26 bp, Homo sapiens
cagagacatcccgaggcctctcctct

SEQ ID NO: 27103 - DNA, 26 bp, Homo sapiens
agagacatcccgaggcctctcctctc

SEQ ID NO: 27104 - DNA, 26 bp, Homo sapiens
gagacatcccgaggcctctcctctcc

SEQ ID NO: 27105 - DNA, 26 bp, Homo sapiens
agacatcccgaggcctctcctctccg

SEQ ID NO: 27106 - DNA, 26 bp, Homo sapiens
gacatcccgaggcctctcctctccgc

SEQ ID NO: 27107 - DNA, 26 bp, Homo sapiens
acatcccgaggcctctcctctccgcg

SEQ ID NO: 27108 - DNA, 26 bp, Homo sapiens
catcccgaggcctctcctctccgcgc

SEQ ID NO: 27109 - DNA, 26 bp, Homo sapiens
atcccgaggcctctcctctccgcgca

SEQ ID NO: 27110 - DNA, 26 bp, Homo sapiens
tcccgaggcctctcctctccgcgcac

SEQ ID NO: 27111 - DNA, 26 bp, Homo sapiens
cccgaggcctctcctctccgcgcacc

SEQ ID NO: 27112 - DNA, 26 bp, Homo sapiens
ccgaggcctctcctctccgcgcacca

SEQ ID NO: 27113 - DNA, 26 bp, Homo sapiens
cgaggcctctcctctccgcgcaccac

SEQ ID NO: 27114 - DNA, 26 bp, Homo sapiens
gaggcctctcctctccgcgcaccact

SEQ ID NO: 27115 - DNA, 26 bp, Homo sapiens
aggcctctcctctccgcgcaccactg

SEQ ID NO: 27116 - DNA, 26 bp, Homo sapiens
ggcctctcctctccgcgcaccactgt

SEQ ID NO: 27117 - DNA, 26 bp, Homo sapiens
gcctctcctctccgcgcaccactgtt

SEQ ID NO: 27118 - DNA, 26 bp, Homo sapiens
cctctcctctccgcgcaccactgttt

SEQ ID NO: 27119 - DNA, 26 bp, Homo sapiens
ctctcctctccgcgcaccactgtttc

SEQ ID NO: 27120 - DNA, 26 bp, Homo sapiens
tctcctctccgcgcaccactgtttct

SEQ ID NO: 27121 - DNA, 26 bp, Homo sapiens
ctcctctccgcgcaccactgtttcta

SEQ ID NO: 27122 - DNA, 26 bp, Homo sapiens
tcctctccgcgcaccactgtttctag

SEQ ID NO: 27123 - DNA, 26 bp, Homo sapiens
cctctccgcgcaccactgtttctagc

SEQ ID NO: 27124 - DNA, 26 bp, Homo sapiens
ctctccgcgcaccactgtttctagcg

SEQ ID NO: 27125 - DNA, 26 bp, Homo sapiens
tctccgcgcaccactgtttctagcgt

SEQ ID NO: 27126 - DNA, 26 bp, Homo sapiens
ctccgcgcaccactgtttctagcgtt

SEQ ID NO: 27127 - DNA, 26 bp, Homo sapiens
tccgcgcaccactgtttctagcgtta

SEQ ID NO: 27128 - DNA, 26 bp, Homo sapiens
ccgcgcaccactgtttctagcgttag

SEQ ID NO: 27129 - DNA, 26 bp, Homo sapiens
cgcgcaccactgtttctagcgttagt

SEQ ID NO: 27130 - DNA, 26 bp, Homo sapiens
gcgcaccactgtttctagcgttagtc

SEQ ID NO: 27131 - DNA, 26 bp, Homo sapiens
cgcaccactgtttctagcgttagtcg

SEQ ID NO: 27132 - DNA, 26 bp, Homo sapiens
gcaccactgtttctagcgttagtcgc

SEQ ID NO: 27133 - DNA, 26 bp, Homo sapiens
caccactgtttctagcgttagtcgct

SEQ ID NO: 27134 - DNA, 26 bp, Homo sapiens
accactgtttctagcgttagtcgctc

SEQ ID NO: 27135 - DNA, 26 bp, Homo sapiens
ccactgtttctagcgttagtcgctca

SEQ ID NO: 27136 - DNA, 26 bp, Homo sapiens
cactgtttctagcgttagtcgctcac

SEQ ID NO: 27137 - DNA, 26 bp, Homo sapiens
actgtttctagcgttagtcgctcacc

SEQ ID NO: 27138 - DNA, 26 bp, Homo sapiens
ttaagaaagtgtacaaactttattga

SEQ ID NO: 27139 - DNA, 26 bp, Homo sapiens
taagaaagtgtacaaactttattgaa

SEQ ID NO: 27140 - DNA, 26 bp, Homo sapiens
aagaaagtgtacaaactttattgaaa

SEQ ID NO: 27141 - DNA, 26 bp, Homo sapiens
agaaagtgtacaaactttattgaaac

SEQ ID NO: 27142 - DNA, 26 bp, Homo sapiens
gaaagtgtacaaactttattgaaacg

SEQ ID NO: 27143 - DNA, 26 bp, Homo sapiens
aaagtgtacaaactttattgaaacgc

SEQ ID NO: 27144 - DNA, 26 bp, Homo sapiens
aagtgtacaaactttattgaaacgca

SEQ ID NO: 27145 - DNA, 26 bp, Homo sapiens
agtgtacaaactttattgaaacgcac

SEQ ID NO: 27146 - DNA, 26 bp, Homo sapiens
gtgtacaaactttattgaaacgcaca

SEQ ID NO: 27147 - DNA, 26 bp, Homo sapiens
tgtacaaactttattgaaacgcacac

SEQ ID NO: 27148 - DNA, 26 bp, Homo sapiens
gtacaaactttattgaaacgcacacg

SEQ ID NO: 27149 - DNA, 26 bp, Homo sapiens
tacaaactttattgaaacgcacacgc

SEQ ID NO: 27150 - DNA, 26 bp, Homo sapiens
acaaactttattgaaacgcacacgcg

SEQ ID NO: 27151 - DNA, 26 bp, Homo sapiens
caaactttattgaaacgcacacgcgc

SEQ ID NO: 27152 - DNA, 26 bp, Homo sapiens
aaactttattgaaacgcacacgcgca

SEQ ID NO: 27153 - DNA, 26 bp, Homo sapiens
aactttattgaaacgcacacgcgcac

SEQ ID NO: 27154 - DNA, 26 bp, Homo sapiens
actttattgaaacgcacacgcgcaca

SEQ ID NO: 27155 - DNA, 26 bp, Homo sapiens
ctttattgaaacgcacacgcgcacac

SEQ ID NO: 27156 - DNA, 26 bp, Homo sapiens
tttattgaaacgcacacgcgcacaca

SEQ ID NO: 27157 - DNA, 26 bp, Homo sapiens
ttattgaaacgcacacgcgcacacac

SEQ ID NO: 27158 - DNA, 26 bp, Homo sapiens
tattgaaacgcacacgcgcacacaca

SEQ ID NO: 27159 - DNA, 26 bp, Homo sapiens
attgaaacgcacacgcgcacacacac

SEQ ID NO: 27160 - DNA, 26 bp, Homo sapiens
ttgaaacgcacacgcgcacacacaca

SEQ ID NO: 27161 - DNA, 26 bp, Homo sapiens
tgaaacgcacacgcgcacacacacaa

SEQ ID NO: 27162 - DNA, 26 bp, Homo sapiens
gaaacgcacacgcgcacacacacaaa

SEQ ID NO: 27163 - DNA, 26 bp, Homo sapiens
aaacgcacacgcgcacacacacaaac

SEQ ID NO: 27164 - DNA, 26 bp, Homo sapiens
aacgcacacgcgcacacacacaaaca

SEQ ID NO: 27165 - DNA, 26 bp, Homo sapiens
acgcacacgcgcacacacacaaacac

SEQ ID NO: 27166 - DNA, 26 bp, Homo sapiens
cgcacacgcgcacacacacaaacacc

SEQ ID NO: 27167 - DNA, 26 bp, Homo sapiens
gcacacgcgcacacacacaaacaccc

SEQ ID NO: 27168 - DNA, 26 bp, Homo sapiens
cacacgcgcacacacacaaacacccc

SEQ ID NO: 27169 - DNA, 26 bp, Homo sapiens
acacgcgcacacacacaaacacccct

SEQ ID NO: 27170 - DNA, 26 bp, Homo sapiens
cacgcgcacacacacaaacacccctg

SEQ ID NO: 27171 - DNA, 26 bp, Homo sapiens
acgcgcacacacacaaacacccctgt

SEQ ID NO: 27172 - DNA, 26 bp, Homo sapiens
cgcgcacacacacaaacacccctgtg

SEQ ID NO: 27173 - DNA, 26 bp, Homo sapiens
gcgcacacacacaaacacccctgtgg

SEQ ID NO: 27174 - DNA, 26 bp, Homo sapiens
cgcacacacacaaacacccctgtgga

SEQ ID NO: 27175 - DNA, 26 bp, Homo sapiens
gcacacacacaaacacccctgtggat

SEQ ID NO: 27176 - DNA, 26 bp, Homo sapiens
cacacacacaaacacccctgtggata

SEQ ID NO: 27177 - DNA, 26 bp, Homo sapiens
acacacacaaacacccctgtggatag

SEQ ID NO: 27178 - DNA, 26 bp, Homo sapiens
cacacacaaacacccctgtggatagg

SEQ ID NO: 27179 - DNA, 26 bp, Homo sapiens
acacacaaacacccctgtggataggg

SEQ ID NO: 27180 - DNA, 26 bp, Homo sapiens
cacacaaacacccctgtggataggga

SEQ ID NO: 27181 - DNA, 26 bp, Homo sapiens
acacaaacacccctgtggatagggaa

SEQ ID NO: 27182 - DNA, 26 bp, Homo sapiens
cacaaacacccctgtggatagggaaa

SEQ ID NO: 27183 - DNA, 26 bp, Homo sapiens
acaaacacccctgtggatagggaaaa

SEQ ID NO: 27184 - DNA, 26 bp, Homo sapiens
caaacacccctgtggatagggaaaag

SEQ ID NO: 27185 - DNA, 26 bp, Homo sapiens
aaacacccctgtggatagggaaaagc

SEQ ID NO: 27186 - DNA, 26 bp, Homo sapiens
aacacccctgtggatagggaaaagca

SEQ ID NO: 27187 - DNA, 26 bp, Homo sapiens
acacccctgtggatagggaaaagcac

SEQ ID NO: 27188 - DNA, 26 bp, Homo sapiens
cacccctgtggatagggaaaagcacc

SEQ ID NO: 27189 - DNA, 26 bp, Homo sapiens
acccctgtggatagggaaaagcacct

SEQ ID NO: 27190 - DNA, 26 bp, Homo sapiens
cccctgtggatagggaaaagcacctg

SEQ ID NO: 27191 - DNA, 26 bp, Homo sapiens
ccctgtggatagggaaaagcacctgg

SEQ ID NO: 27192 - DNA, 26 bp, Homo sapiens
cctgtggatagggaaaagcacctggc

SEQ ID NO: 27193 - DNA, 26 bp, Homo sapiens
ctgtggatagggaaaagcacctggcc

SEQ ID NO: 27194 - DNA, 26 bp, Homo sapiens
tgtggatagggaaaagcacctggcca

SEQ ID NO: 27195 - DNA, 26 bp, Homo sapiens
gtggatagggaaaagcacctggccac

SEQ ID NO: 27196 - DNA, 26 bp, Homo sapiens
tggatagggaaaagcacctggccaca

SEQ ID NO: 27197 - DNA, 26 bp, Homo sapiens
ggatagggaaaagcacctggccacag

SEQ ID NO: 27198 - DNA, 26 bp, Homo sapiens
gatagggaaaagcacctggccacagg

SEQ ID NO: 27199 - DNA, 26 bp, Homo sapiens
atagggaaaagcacctggccacaggg

SEQ ID NO: 27200 - DNA, 26 bp, Homo sapiens
tagggaaaagcacctggccacagggt

SEQ ID NO: 27201 - DNA, 26 bp, Homo sapiens
agggaaaagcacctggccacagggtc

SEQ ID NO: 27202 - DNA, 26 bp, Homo sapiens
gggaaaagcacctggccacagggtcc

SEQ ID NO: 27203 - DNA, 26 bp, Homo sapiens
ggaaaagcacctggccacagggtcca

SEQ ID NO: 27204 - DNA, 26 bp, Homo sapiens
gaaaagcacctggccacagggtccac

SEQ ID NO: 27205 - DNA, 26 bp, Homo sapiens
aaaagcacctggccacagggtccact

SEQ ID NO: 27206 - DNA, 26 bp, Homo sapiens
aaagcacctggccacagggtccactg

SEQ ID NO: 27207 - DNA, 26 bp, Homo sapiens
aagcacctggccacagggtccactga

SEQ ID NO: 27208 - DNA, 26 bp, Homo sapiens
agcacctggccacagggtccactgaa

SEQ ID NO: 27209 - DNA, 26 bp, Homo sapiens
gcacctggccacagggtccactgaaa

SEQ ID NO: 27210 - DNA, 26 bp, Homo sapiens
cacctggccacagggtccactgaaac

SEQ ID NO: 27211 - DNA, 26 bp, Homo sapiens
acctggccacagggtccactgaaacg

SEQ ID NO: 27212 - DNA, 26 bp, Homo sapiens
cctggccacagggtccactgaaacgg

SEQ ID NO: 27213 - DNA, 26 bp, Homo sapiens
ctggccacagggtccactgaaacggg

SEQ ID NO: 27214 - DNA, 26 bp, Homo sapiens
tggccacagggtccactgaaacgggg

SEQ ID NO: 27215 - DNA, 26 bp, Homo sapiens
ggccacagggtccactgaaacgggga

SEQ ID NO: 27216 - DNA, 26 bp, Homo sapiens
gccacagggtccactgaaacggggag

SEQ ID NO: 27217 - DNA, 26 bp, Homo sapiens
ccacagggtccactgaaacggggagg

SEQ ID NO: 27218 - DNA, 26 bp, Homo sapiens
cacagggtccactgaaacggggaggg

SEQ ID NO: 27219 - DNA, 26 bp, Homo sapiens
acagggtccactgaaacggggagggg

SEQ ID NO: 27220 - DNA, 26 bp, Homo sapiens
cagggtccactgaaacggggagggga

SEQ ID NO: 27221 - DNA, 26 bp, Homo sapiens
agggtccactgaaacggggaggggat

SEQ ID NO: 27222 - DNA, 26 bp, Homo sapiens
gggtccactgaaacggggaggggatg

SEQ ID NO: 27223 - DNA, 26 bp, Homo sapiens
ggtccactgaaacggggaggggatgg

SEQ ID NO: 27224 - DNA, 26 bp, Homo sapiens
gtccactgaaacggggaggggatggc

SEQ ID NO: 27225 - DNA, 26 bp, Homo sapiens
tccactgaaacggggaggggatggca

SEQ ID NO: 27226 - DNA, 26 bp, Homo sapiens
ccactgaaacggggaggggatggcag

SEQ ID NO: 27227 - DNA, 26 bp, Homo sapiens
cactgaaacggggaggggatggcagc

SEQ ID NO: 27228 - DNA, 26 bp, Homo sapiens
actgaaacggggaggggatggcagct

SEQ ID NO: 27229 - DNA, 26 bp, Homo sapiens
ctgaaacggggaggggatggcagctt

SEQ ID NO: 27230 - DNA, 26 bp, Homo sapiens
tgaaacggggaggggatggcagcttg

SEQ ID NO: 27231 - DNA, 26 bp, Homo sapiens
gaaacggggaggggatggcagcttgt

SEQ ID NO: 27232 - DNA, 26 bp, Homo sapiens
aaacggggaggggatggcagcttgta

SEQ ID NO: 27233 - DNA, 26 bp, Homo sapiens
aacggggaggggatggcagcttgtaa

SEQ ID NO: 27234 - DNA, 26 bp, Homo sapiens
acggggaggggatggcagcttgtaat

SEQ ID NO: 27235 - DNA, 26 bp, Homo sapiens
cggggaggggatggcagcttgtaatg

SEQ ID NO: 27236 - DNA, 26 bp, Homo sapiens
ggggaggggatggcagcttgtaatgt

SEQ ID NO: 27237 - DNA, 26 bp, Homo sapiens
gggaggggatggcagcttgtaatgtg

SEQ ID NO: 27238 - DNA, 26 bp, Homo sapiens
ggaggggatggcagcttgtaatgtgg

SEQ ID NO: 27239 - DNA, 26 bp, Homo sapiens
gaggggatggcagcttgtaatgtggc

SEQ ID NO: 27240 - DNA, 26 bp, Homo sapiens
aggggatggcagcttgtaatgtggct

SEQ ID NO: 27241 - DNA, 26 bp, Homo sapiens
ggggatggcagcttgtaatgtggctt

SEQ ID NO: 27242 - DNA, 26 bp, Homo sapiens
gggatggcagcttgtaatgtggcttt

SEQ ID NO: 27243 - DNA, 26 bp, Homo sapiens
ggatggcagcttgtaatgtggctttt

SEQ ID NO: 27244 - DNA, 26 bp, Homo sapiens
gatggcagcttgtaatgtggcttttg

SEQ ID NO: 27245 - DNA, 26 bp, Homo sapiens
atggcagcttgtaatgtggcttttgc

SEQ ID NO: 27246 - DNA, 26 bp, Homo sapiens
tggcagcttgtaatgtggcttttgcc

SEQ ID NO: 27247 - DNA, 26 bp, Homo sapiens
ggcagcttgtaatgtggcttttgcca

SEQ ID NO: 27248 - DNA, 26 bp, Homo sapiens
gcagcttgtaatgtggcttttgccac

SEQ ID NO: 27249 - DNA, 26 bp, Homo sapiens
cagcttgtaatgtggcttttgccaca

SEQ ID NO: 27250 - DNA, 26 bp, Homo sapiens
agcttgtaatgtggcttttgccacaa

SEQ ID NO: 27251 - DNA, 26 bp, Homo sapiens
gcttgtaatgtggcttttgccacaac

SEQ ID NO: 27252 - DNA, 26 bp, Homo sapiens
cttgtaatgtggcttttgccacaacc

SEQ ID NO: 27253 - DNA, 26 bp, Homo sapiens
ttgtaatgtggcttttgccacaaccc

SEQ ID NO: 27254 - DNA, 26 bp, Homo sapiens
tgtaatgtggcttttgccacaacccc

SEQ ID NO: 27255 - DNA, 26 bp, Homo sapiens
gtaatgtggcttttgccacaaccccc

SEQ ID NO: 27256 - DNA, 26 bp, Homo sapiens
taatgtggcttttgccacaaccccct

SEQ ID NO: 27257 - DNA, 26 bp, Homo sapiens
aatgtggcttttgccacaaccccctt

SEQ ID NO: 27258 - DNA, 26 bp, Homo sapiens
atgtggcttttgccacaacccccttc

SEQ ID NO: 27259 - DNA, 26 bp, Homo sapiens
tgtggcttttgccacaacccccttct

SEQ ID NO: 27260 - DNA, 26 bp, Homo sapiens
gtggcttttgccacaacccccttctg

SEQ ID NO: 27261 - DNA, 26 bp, Homo sapiens
tggcttttgccacaacccccttctga

SEQ ID NO: 27262 - DNA, 26 bp, Homo sapiens
ggcttttgccacaacccccttctgac

SEQ ID NO: 27263 - DNA, 26 bp, Homo sapiens
gcttttgccacaacccccttctgaca

SEQ ID NO: 27264 - DNA, 26 bp, Homo sapiens
cttttgccacaacccccttctgacag

SEQ ID NO: 27265 - DNA, 26 bp, Homo sapiens
ttttgccacaacccccttctgacagg

SEQ ID NO: 27266 - DNA, 26 bp, Homo sapiens
tttgccacaacccccttctgacaggg

SEQ ID NO: 27267 - DNA, 26 bp, Homo sapiens
ttgccacaacccccttctgacaggga

SEQ ID NO: 27268 - DNA, 26 bp, Homo sapiens
tgccacaacccccttctgacagggaa

SEQ ID NO: 27269 - DNA, 26 bp, Homo sapiens
gccacaacccccttctgacagggaag

SEQ ID NO: 27270 - DNA, 26 bp, Homo sapiens
ccacaacccccttctgacagggaagg

SEQ ID NO: 27271 - DNA, 26 bp, Homo sapiens
cacaacccccttctgacagggaaggc

SEQ ID NO: 27272 - DNA, 26 bp, Homo sapiens
acaacccccttctgacagggaaggcc

SEQ ID NO: 27273 - DNA, 26 bp, Homo sapiens
caacccccttctgacagggaaggcct

SEQ ID NO: 27274 - DNA, 26 bp, Homo sapiens
aacccccttctgacagggaaggcctt

SEQ ID NO: 27275 - DNA, 26 bp, Homo sapiens
acccccttctgacagggaaggcctta

SEQ ID NO: 27276 - DNA, 26 bp, Homo sapiens
cccccttctgacagggaaggccttag

SEQ ID NO: 27277 - DNA, 26 bp, Homo sapiens
ccccttctgacagggaaggccttaga

SEQ ID NO: 27278 - DNA, 26 bp, Homo sapiens
cccttctgacagggaaggccttagat

SEQ ID NO: 27279 - DNA, 26 bp, Homo sapiens
ccttctgacagggaaggccttagatt

SEQ ID NO: 27280 - DNA, 26 bp, Homo sapiens
cttctgacagggaaggccttagattg

SEQ ID NO: 27281 - DNA, 26 bp, Homo sapiens
ttctgacagggaaggccttagattga

SEQ ID NO: 27282 - DNA, 26 bp, Homo sapiens
tctgacagggaaggccttagattgag

SEQ ID NO: 27283 - DNA, 26 bp, Homo sapiens
ctgacagggaaggccttagattgagg

SEQ ID NO: 27284 - DNA, 26 bp, Homo sapiens
tgacagggaaggccttagattgaggc

SEQ ID NO: 27285 - DNA, 26 bp, Homo sapiens
gacagggaaggccttagattgaggcc

SEQ ID NO: 27286 - DNA, 26 bp, Homo sapiens
acagggaaggccttagattgaggccc

SEQ ID NO: 27287 - DNA, 26 bp, Homo sapiens
cagggaaggccttagattgaggcccc

SEQ ID NO: 27288 - DNA, 26 bp, Homo sapiens
agggaaggccttagattgaggcccca

SEQ ID NO: 27289 - DNA, 26 bp, Homo sapiens
gggaaggccttagattgaggccccac

SEQ ID NO: 27290 - DNA, 26 bp, Homo sapiens
ggaaggccttagattgaggccccacc

SEQ ID NO: 27291 - DNA, 26 bp, Homo sapiens
gaaggccttagattgaggccccacct

SEQ ID NO: 27292 - DNA, 26 bp, Homo sapiens
aaggccttagattgaggccccacctc

SEQ ID NO: 27293 - DNA, 26 bp, Homo sapiens
aggccttagattgaggccccacctcc

SEQ ID NO: 27294 - DNA, 26 bp, Homo sapiens
ggccttagattgaggccccacctccc

SEQ ID NO: 27295 - DNA, 26 bp, Homo sapiens
gccttagattgaggccccacctccca

SEQ ID NO: 27296 - DNA, 26 bp, Homo sapiens
ccttagattgaggccccacctcccat

SEQ ID NO: 27297 - DNA, 26 bp, Homo sapiens
cttagattgaggccccacctcccatg

SEQ ID NO: 27298 - DNA, 26 bp, Homo sapiens
ttagattgaggccccacctcccatgg

SEQ ID NO: 27299 - DNA, 26 bp, Homo sapiens
tagattgaggccccacctcccatggt

SEQ ID NO: 27300 - DNA, 26 bp, Homo sapiens
agattgaggccccacctcccatggtg

SEQ ID NO: 27301 - DNA, 26 bp, Homo sapiens
gattgaggccccacctcccatggtga

SEQ ID NO: 27302 - DNA, 26 bp, Homo sapiens
attgaggccccacctcccatggtgat

SEQ ID NO: 27303 - DNA, 26 bp, Homo sapiens
ttgaggccccacctcccatggtgatg

SEQ ID NO: 27304 - DNA, 26 bp, Homo sapiens
tgaggccccacctcccatggtgatgg

SEQ ID NO: 27305 - DNA, 26 bp, Homo sapiens
gaggccccacctcccatggtgatggg

SEQ ID NO: 27306 - DNA, 26 bp, Homo sapiens
aggccccacctcccatggtgatgggg

SEQ ID NO: 27307 - DNA, 26 bp, Homo sapiens
ggccccacctcccatggtgatgggga

SEQ ID NO: 27308 - DNA, 26 bp, Homo sapiens
gccccacctcccatggtgatggggag

SEQ ID NO: 27309 - DNA, 26 bp, Homo sapiens
ccccacctcccatggtgatggggagc

SEQ ID NO: 27310 - DNA, 26 bp, Homo sapiens
cccacctcccatggtgatggggagct

SEQ ID NO: 27311 - DNA, 26 bp, Homo sapiens
ccacctcccatggtgatggggagctc

SEQ ID NO: 27312 - DNA, 26 bp, Homo sapiens
cacctcccatggtgatggggagctca

SEQ ID NO: 27313 - DNA, 26 bp, Homo sapiens
acctcccatggtgatggggagctcag

SEQ ID NO: 27314 - DNA, 26 bp, Homo sapiens
cctcccatggtgatggggagctcaga

SEQ ID NO: 27315 - DNA, 26 bp, Homo sapiens
ctcccatggtgatggggagctcagaa

SEQ ID NO: 27316 - DNA, 26 bp, Homo sapiens
tcccatggtgatggggagctcagaat

SEQ ID NO: 27317 - DNA, 26 bp, Homo sapiens
cccatggtgatggggagctcagaatg

SEQ ID NO: 27318 - DNA, 26 bp, Homo sapiens
ccatggtgatggggagctcagaatgg

SEQ ID NO: 27319 - DNA, 26 bp, Homo sapiens
catggtgatggggagctcagaatggg

SEQ ID NO: 27320 - DNA, 26 bp, Homo sapiens
atggtgatggggagctcagaatgggg

SEQ ID NO: 27321 - DNA, 26 bp, Homo sapiens
tggtgatggggagctcagaatggggt

SEQ ID NO: 27322 - DNA, 26 bp, Homo sapiens
ggtgatggggagctcagaatggggtc

SEQ ID NO: 27323 - DNA, 26 bp, Homo sapiens
gtgatggggagctcagaatggggtcc

SEQ ID NO: 27324 - DNA, 26 bp, Homo sapiens
tgatggggagctcagaatggggtcca

SEQ ID NO: 27325 - DNA, 26 bp, Homo sapiens
gatggggagctcagaatggggtccag

SEQ ID NO: 27326 - DNA, 26 bp, Homo sapiens
atggggagctcagaatggggtccagg

SEQ ID NO: 27327 - DNA, 26 bp, Homo sapiens
tggggagctcagaatggggtccaggg

SEQ ID NO: 27328 - DNA, 26 bp, Homo sapiens
ggggagctcagaatggggtccaggga

SEQ ID NO: 27329 - DNA, 26 bp, Homo sapiens
gggagctcagaatggggtccagggag

SEQ ID NO: 27330 - DNA, 26 bp, Homo sapiens
ggagctcagaatggggtccagggaga

SEQ ID NO: 27331 - DNA, 26 bp, Homo sapiens
gagctcagaatggggtccagggagaa

SEQ ID NO: 27332 - DNA, 26 bp, Homo sapiens
agctcagaatggggtccagggagaat

SEQ ID NO: 27333 - DNA, 26 bp, Homo sapiens
gctcagaatggggtccagggagaatt

SEQ ID NO: 27334 - DNA, 26 bp, Homo sapiens
ctcagaatggggtccagggagaattt

SEQ ID NO: 27335 - DNA, 26 bp, Homo sapiens
tcagaatggggtccagggagaatttg

SEQ ID NO: 27336 - DNA, 26 bp, Homo sapiens
cagaatggggtccagggagaatttgg

SEQ ID NO: 27337 - DNA, 26 bp, Homo sapiens
agaatggggtccagggagaatttggt

SEQ ID NO: 27338 - DNA, 26 bp, Homo sapiens
gaatggggtccagggagaatttggtt

SEQ ID NO: 27339 - DNA, 26 bp, Homo sapiens
aatggggtccagggagaatttggtta

SEQ ID NO: 27340 - DNA, 26 bp, Homo sapiens
atggggtccagggagaatttggttag

SEQ ID NO: 27341 - DNA, 26 bp, Homo sapiens
tggggtccagggagaatttggttagg

SEQ ID NO: 27342 - DNA, 26 bp, Homo sapiens
ggggtccagggagaatttggttaggg

SEQ ID NO: 27343 - DNA, 26 bp, Homo sapiens
gggtccagggagaatttggttagggg

SEQ ID NO: 27344 - DNA, 26 bp, Homo sapiens
ggtccagggagaatttggttaggggg

SEQ ID NO: 27345 - DNA, 26 bp, Homo sapiens
gtccagggagaatttggttaggggga

SEQ ID NO: 27346 - DNA, 26 bp, Homo sapiens
tccagggagaatttggttagggggag

SEQ ID NO: 27347 - DNA, 26 bp, Homo sapiens
ccagggagaatttggttagggggagg

SEQ ID NO: 27348 - DNA, 26 bp, Homo sapiens
cagggagaatttggttagggggaggt

SEQ ID NO: 27349 - DNA, 26 bp, Homo sapiens
agggagaatttggttagggggaggtg

SEQ ID NO: 27350 - DNA, 26 bp, Homo sapiens
gggagaatttggttagggggaggtgc

SEQ ID NO: 27351 - DNA, 26 bp, Homo sapiens
ggagaatttggttagggggaggtgct

SEQ ID NO: 27352 - DNA, 26 bp, Homo sapiens
gagaatttggttagggggaggtgcta

SEQ ID NO: 27353 - DNA, 26 bp, Homo sapiens
agaatttggttagggggaggtgctag

SEQ ID NO: 27354 - DNA, 26 bp, Homo sapiens
gaatttggttagggggaggtgctagg

SEQ ID NO: 27355 - DNA, 26 bp, Homo sapiens
aatttggttagggggaggtgctaggg

SEQ ID NO: 27356 - DNA, 26 bp, Homo sapiens
atttggttagggggaggtgctaggga

SEQ ID NO: 27357 - DNA, 26 bp, Homo sapiens
tttggttagggggaggtgctagggag

SEQ ID NO: 27358 - DNA, 26 bp, Homo sapiens
ttggttagggggaggtgctagggagg

SEQ ID NO: 27359 - DNA, 26 bp, Homo sapiens
tggttagggggaggtgctagggaggc

SEQ ID NO: 27360 - DNA, 26 bp, Homo sapiens
ggttagggggaggtgctagggaggcc

SEQ ID NO: 27361 - DNA, 26 bp, Homo sapiens
gttagggggaggtgctagggaggcct

SEQ ID NO: 27362 - DNA, 26 bp, Homo sapiens
ttagggggaggtgctagggaggcctg

SEQ ID NO: 27363 - DNA, 26 bp, Homo sapiens
tagggggaggtgctagggaggcctga

SEQ ID NO: 27364 - DNA, 26 bp, Homo sapiens
agggggaggtgctagggaggcctgag

SEQ ID NO: 27365 - DNA, 26 bp, Homo sapiens
gggggaggtgctagggaggcctgagc

SEQ ID NO: 27366 - DNA, 26 bp, Homo sapiens
ggggaggtgctagggaggcctgagca

SEQ ID NO: 27367 - DNA, 26 bp, Homo sapiens
gggaggtgctagggaggcctgagcag

SEQ ID NO: 27368 - DNA, 26 bp, Homo sapiens
ggaggtgctagggaggcctgagcaga

SEQ ID NO: 27369 - DNA, 26 bp, Homo sapiens
gaggtgctagggaggcctgagcagag

SEQ ID NO: 27370 - DNA, 26 bp, Homo sapiens
aggtgctagggaggcctgagcagagg

SEQ ID NO: 27371 - DNA, 26 bp, Homo sapiens
ggtgctagggaggcctgagcagaggg

SEQ ID NO: 27372 - DNA, 26 bp, Homo sapiens
gtgctagggaggcctgagcagagggc

SEQ ID NO: 27373 - DNA, 26 bp, Homo sapiens
tgctagggaggcctgagcagagggca

SEQ ID NO: 27374 - DNA, 26 bp, Homo sapiens
gctagggaggcctgagcagagggcac

SEQ ID NO: 27375 - DNA, 26 bp, Homo sapiens
ctagggaggcctgagcagagggcacc

SEQ ID NO: 27376 - DNA, 26 bp, Homo sapiens
tagggaggcctgagcagagggcaccc

SEQ ID NO: 27377 - DNA, 26 bp, Homo sapiens
agggaggcctgagcagagggcaccct

SEQ ID NO: 27378 - DNA, 26 bp, Homo sapiens
gggaggcctgagcagagggcaccctc

SEQ ID NO: 27379 - DNA, 26 bp, Homo sapiens
ggaggcctgagcagagggcaccctcc

SEQ ID NO: 27380 - DNA, 26 bp, Homo sapiens
gaggcctgagcagagggcaccctccg

SEQ ID NO: 27381 - DNA, 26 bp, Homo sapiens
aggcctgagcagagggcaccctccga

SEQ ID NO: 27382 - DNA, 26 bp, Homo sapiens
ggcctgagcagagggcaccctccgag

SEQ ID NO: 27383 - DNA, 26 bp, Homo sapiens
gcctgagcagagggcaccctccgagt

SEQ ID NO: 27384 - DNA, 26 bp, Homo sapiens
cctgagcagagggcaccctccgagtg

SEQ ID NO: 27385 - DNA, 26 bp, Homo sapiens
ctgagcagagggcaccctccgagtgg

SEQ ID NO: 27386 - DNA, 26 bp, Homo sapiens
tgagcagagggcaccctccgagtggg

SEQ ID NO: 27387 - DNA, 26 bp, Homo sapiens
gagcagagggcaccctccgagtgggg

SEQ ID NO: 27388 - DNA, 26 bp, Homo sapiens
agcagagggcaccctccgagtggggt

SEQ ID NO: 27389 - DNA, 26 bp, Homo sapiens
gcagagggcaccctccgagtggggtc

SEQ ID NO: 27390 - DNA, 26 bp, Homo sapiens
cagagggcaccctccgagtggggtcc

SEQ ID NO: 27391 - DNA, 26 bp, Homo sapiens
agagggcaccctccgagtggggtccc

SEQ ID NO: 27392 - DNA, 26 bp, Homo sapiens
gagggcaccctccgagtggggtcccg

SEQ ID NO: 27393 - DNA, 26 bp, Homo sapiens
agggcaccctccgagtggggtcccga

SEQ ID NO: 27394 - DNA, 26 bp, Homo sapiens
gggcaccctccgagtggggtcccgag

SEQ ID NO: 27395 - DNA, 26 bp, Homo sapiens
ggcaccctccgagtggggtcccgagg

SEQ ID NO: 27396 - DNA, 26 bp, Homo sapiens
gcaccctccgagtggggtcccgaggg

SEQ ID NO: 27397 - DNA, 26 bp, Homo sapiens
caccctccgagtggggtcccgagggc

SEQ ID NO: 27398 - DNA, 26 bp, Homo sapiens
accctccgagtggggtcccgagggct

SEQ ID NO: 27399 - DNA, 26 bp, Homo sapiens
ccctccgagtggggtcccgagggctg

SEQ ID NO: 27400 - DNA, 26 bp, Homo sapiens
cctccgagtggggtcccgagggctgc

SEQ ID NO: 27401 - DNA, 26 bp, Homo sapiens
ctccgagtggggtcccgagggctgca

SEQ ID NO: 27402 - DNA, 26 bp, Homo sapiens
tccgagtggggtcccgagggctgcag

SEQ ID NO: 27403 - DNA, 26 bp, Homo sapiens
ccgagtggggtcccgagggctgcaga

SEQ ID NO: 27404 - DNA, 26 bp, Homo sapiens
cgagtggggtcccgagggctgcagag

SEQ ID NO: 27405 - DNA, 26 bp, Homo sapiens
gagtggggtcccgagggctgcagagt

SEQ ID NO: 27406 - DNA, 26 bp, Homo sapiens
agtggggtcccgagggctgcagagtc

SEQ ID NO: 27407 - DNA, 26 bp, Homo sapiens
gtggggtcccgagggctgcagagtct

SEQ ID NO: 27408 - DNA, 26 bp, Homo sapiens
tggggtcccgagggctgcagagtctt

SEQ ID NO: 27409 - DNA, 26 bp, Homo sapiens
ggggtcccgagggctgcagagtcttc

SEQ ID NO: 27410 - DNA, 26 bp, Homo sapiens
gggtcccgagggctgcagagtcttca

SEQ ID NO: 27411 - DNA, 26 bp, Homo sapiens
ggtcccgagggctgcagagtcttcag

SEQ ID NO: 27412 - DNA, 26 bp, Homo sapiens
gtcccgagggctgcagagtcttcagt

SEQ ID NO: 27413 - DNA, 26 bp, Homo sapiens
tcccgagggctgcagagtcttcagta

SEQ ID NO: 27414 - DNA, 26 bp, Homo sapiens
cccgagggctgcagagtcttcagtac

SEQ ID NO: 27415 - DNA, 26 bp, Homo sapiens
ccgagggctgcagagtcttcagtact

SEQ ID NO: 27416 - DNA, 26 bp, Homo sapiens
cgagggctgcagagtcttcagtactg

SEQ ID NO: 27417 - DNA, 26 bp, Homo sapiens
gagggctgcagagtcttcagtactgt

SEQ ID NO: 27418 - DNA, 26 bp, Homo sapiens
agggctgcagagtcttcagtactgtc

SEQ ID NO: 27419 - DNA, 26 bp, Homo sapiens
gggctgcagagtcttcagtactgtcc

SEQ ID NO: 27420 - DNA, 26 bp, Homo sapiens
ggctgcagagtcttcagtactgtccc

SEQ ID NO: 27421 - DNA, 26 bp, Homo sapiens
gctgcagagtcttcagtactgtccct

SEQ ID NO: 27422 - DNA, 26 bp, Homo sapiens
ctgcagagtcttcagtactgtccctc

SEQ ID NO: 27423 - DNA, 26 bp, Homo sapiens
tgcagagtcttcagtactgtccctca

SEQ ID NO: 27424 - DNA, 26 bp, Homo sapiens
gcagagtcttcagtactgtccctcac

SEQ ID NO: 27425 - DNA, 26 bp, Homo sapiens
cagagtcttcagtactgtccctcaca

SEQ ID NO: 27426 - DNA, 26 bp, Homo sapiens
agagtcttcagtactgtccctcacag

SEQ ID NO: 27427 - DNA, 26 bp, Homo sapiens
gagtcttcagtactgtccctcacagc

SEQ ID NO: 27428 - DNA, 26 bp, Homo sapiens
agtcttcagtactgtccctcacagca

SEQ ID NO: 27429 - DNA, 26 bp, Homo sapiens
gtcttcagtactgtccctcacagcag

SEQ ID NO: 27430 - DNA, 26 bp, Homo sapiens
tcttcagtactgtccctcacagcagc

SEQ ID NO: 27431 - DNA, 26 bp, Homo sapiens
cttcagtactgtccctcacagcagct

SEQ ID NO: 27432 - DNA, 26 bp, Homo sapiens
ttcagtactgtccctcacagcagctg

SEQ ID NO: 27433 - DNA, 26 bp, Homo sapiens
tcagtactgtccctcacagcagctgt

SEQ ID NO: 27434 - DNA, 26 bp, Homo sapiens
cagtactgtccctcacagcagctgtc

SEQ ID NO: 27435 - DNA, 26 bp, Homo sapiens
agtactgtccctcacagcagctgtct

SEQ ID NO: 27436 - DNA, 26 bp, Homo sapiens
gtactgtccctcacagcagctgtctc

SEQ ID NO: 27437 - DNA, 26 bp, Homo sapiens
tactgtccctcacagcagctgtctca

SEQ ID NO: 27438 - DNA, 26 bp, Homo sapiens
actgtccctcacagcagctgtctcaa

SEQ ID NO: 27439 - DNA, 26 bp, Homo sapiens
ctgtccctcacagcagctgtctcaag

SEQ ID NO: 27440 - DNA, 26 bp, Homo sapiens
tgtccctcacagcagctgtctcaagg

SEQ ID NO: 27441 - DNA, 26 bp, Homo sapiens
gtccctcacagcagctgtctcaaggc

SEQ ID NO: 27442 - DNA, 26 bp, Homo sapiens
tccctcacagcagctgtctcaaggct

SEQ ID NO: 27443 - DNA, 26 bp, Homo sapiens
ccctcacagcagctgtctcaaggctg

SEQ ID NO: 27444 - DNA, 26 bp, Homo sapiens
cctcacagcagctgtctcaaggctgg

SEQ ID NO: 27445 - DNA, 26 bp, Homo sapiens
ctcacagcagctgtctcaaggctggg

SEQ ID NO: 27446 - DNA, 26 bp, Homo sapiens
tcacagcagctgtctcaaggctgggt

SEQ ID NO: 27447 - DNA, 26 bp, Homo sapiens
cacagcagctgtctcaaggctgggtc

SEQ ID NO: 27448 - DNA, 26 bp, Homo sapiens
acagcagctgtctcaaggctgggtcc

SEQ ID NO: 27449 - DNA, 26 bp, Homo sapiens
cagcagctgtctcaaggctgggtccc

SEQ ID NO: 27450 - DNA, 26 bp, Homo sapiens
agcagctgtctcaaggctgggtccct

SEQ ID NO: 27451 - DNA, 26 bp, Homo sapiens
gcagctgtctcaaggctgggtccctc

SEQ ID NO: 27452 - DNA, 26 bp, Homo sapiens
cagctgtctcaaggctgggtccctca

SEQ ID NO: 27453 - DNA, 26 bp, Homo sapiens
agctgtctcaaggctgggtccctcaa

SEQ ID NO: 27454 - DNA, 26 bp, Homo sapiens
gctgtctcaaggctgggtccctcaaa

SEQ ID NO: 27455 - DNA, 26 bp, Homo sapiens
ctgtctcaaggctgggtccctcaaag

SEQ ID NO: 27456 - DNA, 26 bp, Homo sapiens
tgtctcaaggctgggtccctcaaagg

SEQ ID NO: 27457 - DNA, 26 bp, Homo sapiens
gtctcaaggctgggtccctcaaaggg

SEQ ID NO: 27458 - DNA, 26 bp, Homo sapiens
tctcaaggctgggtccctcaaagggg

SEQ ID NO: 27459 - DNA, 26 bp, Homo sapiens
ctcaaggctgggtccctcaaaggggc

SEQ ID NO: 27460 - DNA, 26 bp, Homo sapiens
tcaaggctgggtccctcaaaggggcg

SEQ ID NO: 27461 - DNA, 26 bp, Homo sapiens
caaggctgggtccctcaaaggggcgt

SEQ ID NO: 27462 - DNA, 26 bp, Homo sapiens
aaggctgggtccctcaaaggggcgtc

SEQ ID NO: 27463 - DNA, 26 bp, Homo sapiens
aggctgggtccctcaaaggggcgtcc

SEQ ID NO: 27464 - DNA, 26 bp, Homo sapiens
ggctgggtccctcaaaggggcgtccc

SEQ ID NO: 27465 - DNA, 26 bp, Homo sapiens
gctgggtccctcaaaggggcgtccca

SEQ ID NO: 27466 - DNA, 26 bp, Homo sapiens
ctgggtccctcaaaggggcgtcccag

SEQ ID NO: 27467 - DNA, 26 bp, Homo sapiens
tgggtccctcaaaggggcgtcccagc

SEQ ID NO: 27468 - DNA, 26 bp, Homo sapiens
gggtccctcaaaggggcgtcccagcg

SEQ ID NO: 27469 - DNA, 26 bp, Homo sapiens
ggtccctcaaaggggcgtcccagcgc

SEQ ID NO: 27470 - DNA, 26 bp, Homo sapiens
gtccctcaaaggggcgtcccagcgcg

SEQ ID NO: 27471 - DNA, 26 bp, Homo sapiens
tccctcaaaggggcgtcccagcgcgg

SEQ ID NO: 27472 - DNA, 26 bp, Homo sapiens
ccctcaaaggggcgtcccagcgcggg

SEQ ID NO: 27473 - DNA, 26 bp, Homo sapiens
cctcaaaggggcgtcccagcgcgggg

SEQ ID NO: 27474 - DNA, 26 bp, Homo sapiens
ctcaaaggggcgtcccagcgcggggc

SEQ ID NO: 27475 - DNA, 26 bp, Homo sapiens
tcaaaggggcgtcccagcgcggggcc

SEQ ID NO: 27476 - DNA, 26 bp, Homo sapiens
caaaggggcgtcccagcgcggggcct

SEQ ID NO: 27477 - DNA, 26 bp, Homo sapiens
aaaggggcgtcccagcgcggggcctc

SEQ ID NO: 27478 - DNA, 26 bp, Homo sapiens
aaggggcgtcccagcgcggggcctcc

SEQ ID NO: 27479 - DNA, 26 bp, Homo sapiens
aggggcgtcccagcgcggggcctccc

SEQ ID NO: 27480 - DNA, 26 bp, Homo sapiens
ggggcgtcccagcgcggggcctccct

SEQ ID NO: 27481 - DNA, 26 bp, Homo sapiens
gggcgtcccagcgcggggcctccctg

SEQ ID NO: 27482 - DNA, 26 bp, Homo sapiens
ggcgtcccagcgcggggcctccctgc

SEQ ID NO: 27483 - DNA, 26 bp, Homo sapiens
gcgtcccagcgcggggcctccctgcg

SEQ ID NO: 27484 - DNA, 26 bp, Homo sapiens
cgtcccagcgcggggcctccctgcgc

SEQ ID NO: 27485 - DNA, 26 bp, Homo sapiens
gtcccagcgcggggcctccctgcgca

SEQ ID NO: 27486 - DNA, 26 bp, Homo sapiens
tcccagcgcggggcctccctgcgcaa

SEQ ID NO: 27487 - DNA, 26 bp, Homo sapiens
cccagcgcggggcctccctgcgcaaa

SEQ ID NO: 27488 - DNA, 26 bp, Homo sapiens
ccagcgcggggcctccctgcgcaaac

SEQ ID NO: 27489 - DNA, 26 bp, Homo sapiens
cagcgcggggcctccctgcgcaaaca

SEQ ID NO: 27490 - DNA, 26 bp, Homo sapiens
agcgcggggcctccctgcgcaaacac

SEQ ID NO: 27491 - DNA, 26 bp, Homo sapiens
gcgcggggcctccctgcgcaaacact

SEQ ID NO: 27492 - DNA, 26 bp, Homo sapiens
cgcggggcctccctgcgcaaacactt

SEQ ID NO: 27493 - DNA, 26 bp, Homo sapiens
gcggggcctccctgcgcaaacacttg

SEQ ID NO: 27494 - DNA, 26 bp, Homo sapiens
cggggcctccctgcgcaaacacttgg

SEQ ID NO: 27495 - DNA, 26 bp, Homo sapiens
ggggcctccctgcgcaaacacttggt

SEQ ID NO: 27496 - DNA, 26 bp, Homo sapiens
gggcctccctgcgcaaacacttggta

SEQ ID NO: 27497 - DNA, 26 bp, Homo sapiens
ggcctccctgcgcaaacacttggtac

SEQ ID NO: 27498 - DNA, 26 bp, Homo sapiens
gcctccctgcgcaaacacttggtacc

SEQ ID NO: 27499 - DNA, 26 bp, Homo sapiens
cctccctgcgcaaacacttggtaccc

SEQ ID NO: 27500 - DNA, 26 bp, Homo sapiens
ctccctgcgcaaacacttggtacccc

SEQ ID NO: 27501 - DNA, 26 bp, Homo sapiens
tccctgcgcaaacacttggtacccct

SEQ ID NO: 27502 - DNA, 26 bp, Homo sapiens
ccctgcgcaaacacttggtacccctg

SEQ ID NO: 27503 - DNA, 26 bp, Homo sapiens
cctgcgcaaacacttggtacccctgg

SEQ ID NO: 27504 - DNA, 26 bp, Homo sapiens
ctgcgcaaacacttggtacccctggc

SEQ ID NO: 27505 - DNA, 26 bp, Homo sapiens
tgcgcaaacacttggtacccctggct

SEQ ID NO: 27506 - DNA, 26 bp, Homo sapiens
gcgcaaacacttggtacccctggctg

SEQ ID NO: 27507 - DNA, 26 bp, Homo sapiens
cgcaaacacttggtacccctggctgc

SEQ ID NO: 27508 - DNA, 26 bp, Homo sapiens
gcaaacacttggtacccctggctgcg

SEQ ID NO: 27509 - DNA, 26 bp, Homo sapiens
caaacacttggtacccctggctgcgc

SEQ ID NO: 27510 - DNA, 26 bp, Homo sapiens
aaacacttggtacccctggctgcgca

SEQ ID NO: 27511 - DNA, 26 bp, Homo sapiens
aacacttggtacccctggctgcgcag

SEQ ID NO: 27512 - DNA, 26 bp, Homo sapiens
acacttggtacccctggctgcgcagc

SEQ ID NO: 27513 - DNA, 26 bp, Homo sapiens
cacttggtacccctggctgcgcagcg

SEQ ID NO: 27514 - DNA, 26 bp, Homo sapiens
acttggtacccctggctgcgcagcgg

SEQ ID NO: 27515 - DNA, 26 bp, Homo sapiens
cttggtacccctggctgcgcagcgga

SEQ ID NO: 27516 - DNA, 26 bp, Homo sapiens
ttggtacccctggctgcgcagcggaa

SEQ ID NO: 27517 - DNA, 26 bp, Homo sapiens
tggtacccctggctgcgcagcggaag

SEQ ID NO: 27518 - DNA, 26 bp, Homo sapiens
ggtacccctggctgcgcagcggaagc

SEQ ID NO: 27519 - DNA, 26 bp, Homo sapiens
gtacccctggctgcgcagcggaagcc

SEQ ID NO: 27520 - DNA, 26 bp, Homo sapiens
tacccctggctgcgcagcggaagcca

SEQ ID NO: 27521 - DNA, 26 bp, Homo sapiens
acccctggctgcgcagcggaagccag

SEQ ID NO: 27522 - DNA, 26 bp, Homo sapiens
cccctggctgcgcagcggaagccagc

SEQ ID NO: 27523 - DNA, 26 bp, Homo sapiens
ccctggctgcgcagcggaagccagca

SEQ ID NO: 27524 - DNA, 26 bp, Homo sapiens
cctggctgcgcagcggaagccagcag

SEQ ID NO: 27525 - DNA, 26 bp, Homo sapiens
ctggctgcgcagcggaagccagcagg

SEQ ID NO: 27526 - DNA, 26 bp, Homo sapiens
tggctgcgcagcggaagccagcagga

SEQ ID NO: 27527 - DNA, 26 bp, Homo sapiens
ggctgcgcagcggaagccagcaggac

SEQ ID NO: 27528 - DNA, 26 bp, Homo sapiens
gctgcgcagcggaagccagcaggaca

SEQ ID NO: 27529 - DNA, 26 bp, Homo sapiens
ctgcgcagcggaagccagcaggacag

SEQ ID NO: 27530 - DNA, 26 bp, Homo sapiens
tgcgcagcggaagccagcaggacagc

SEQ ID NO: 27531 - DNA, 26 bp, Homo sapiens
gcgcagcggaagccagcaggacagca

SEQ ID NO: 27532 - DNA, 26 bp, Homo sapiens
cgcagcggaagccagcaggacagcag

SEQ ID NO: 27533 - DNA, 26 bp, Homo sapiens
gcagcggaagccagcaggacagcagt

SEQ ID NO: 27534 - DNA, 26 bp, Homo sapiens
cagcggaagccagcaggacagcagtg

SEQ ID NO: 27535 - DNA, 26 bp, Homo sapiens
agcggaagccagcaggacagcagtgg

SEQ ID NO: 27536 - DNA, 26 bp, Homo sapiens
gcggaagccagcaggacagcagtggc

SEQ ID NO: 27537 - DNA, 26 bp, Homo sapiens
cggaagccagcaggacagcagtggcg

SEQ ID NO: 27538 - DNA, 26 bp, Homo sapiens
ggaagccagcaggacagcagtggcgc

SEQ ID NO: 27539 - DNA, 26 bp, Homo sapiens
gaagccagcaggacagcagtggcgcc

SEQ ID NO: 27540 - DNA, 26 bp, Homo sapiens
aagccagcaggacagcagtggcgccg

SEQ ID NO: 27541 - DNA, 26 bp, Homo sapiens
agccagcaggacagcagtggcgccga

SEQ ID NO: 27542 - DNA, 26 bp, Homo sapiens
gccagcaggacagcagtggcgccgat

SEQ ID NO: 27543 - DNA, 26 bp, Homo sapiens
ccagcaggacagcagtggcgccgatc

SEQ ID NO: 27544 - DNA, 26 bp, Homo sapiens
cagcaggacagcagtggcgccgatca

SEQ ID NO: 27545 - DNA, 26 bp, Homo sapiens
agcaggacagcagtggcgccgatcag

SEQ ID NO: 27546 - DNA, 26 bp, Homo sapiens
gcaggacagcagtggcgccgatcagc

SEQ ID NO: 27547 - DNA, 26 bp, Homo sapiens
caggacagcagtggcgccgatcagca

SEQ ID NO: 27548 - DNA, 26 bp, Homo sapiens
aggacagcagtggcgccgatcagcac

SEQ ID NO: 27549 - DNA, 26 bp, Homo sapiens
ggacagcagtggcgccgatcagcaca

SEQ ID NO: 27550 - DNA, 26 bp, Homo sapiens
gacagcagtggcgccgatcagcacaa

SEQ ID NO: 27551 - DNA, 26 bp, Homo sapiens
acagcagtggcgccgatcagcacaac

SEQ ID NO: 27552 - DNA, 26 bp, Homo sapiens
cagcagtggcgccgatcagcacaaca

SEQ ID NO: 27553 - DNA, 26 bp, Homo sapiens
agcagtggcgccgatcagcacaacag

SEQ ID NO: 27554 - DNA, 26 bp, Homo sapiens
gcagtggcgccgatcagcacaacaga

SEQ ID NO: 27555 - DNA, 26 bp, Homo sapiens
cagtggcgccgatcagcacaacagac

SEQ ID NO: 27556 - DNA, 26 bp, Homo sapiens
agtggcgccgatcagcacaacagacg

SEQ ID NO: 27557 - DNA, 26 bp, Homo sapiens
gtggcgccgatcagcacaacagacgc

SEQ ID NO: 27558 - DNA, 26 bp, Homo sapiens
tggcgccgatcagcacaacagacgcc

SEQ ID NO: 27559 - DNA, 26 bp, Homo sapiens
ggcgccgatcagcacaacagacgccc

SEQ ID NO: 27560 - DNA, 26 bp, Homo sapiens
gcgccgatcagcacaacagacgccct

SEQ ID NO: 27561 - DNA, 26 bp, Homo sapiens
cgccgatcagcacaacagacgccctg

SEQ ID NO: 27562 - DNA, 26 bp, Homo sapiens
gccgatcagcacaacagacgccctgg

SEQ ID NO: 27563 - DNA, 26 bp, Homo sapiens
ccgatcagcacaacagacgccctggc

SEQ ID NO: 27564 - DNA, 26 bp, Homo sapiens
cgatcagcacaacagacgccctggcg

SEQ ID NO: 27565 - DNA, 26 bp, Homo sapiens
gatcagcacaacagacgccctggcgg

SEQ ID NO: 27566 - DNA, 26 bp, Homo sapiens
atcagcacaacagacgccctggcggt

SEQ ID NO: 27567 - DNA, 26 bp, Homo sapiens
tcagcacaacagacgccctggcggta

SEQ ID NO: 27568 - DNA, 26 bp, Homo sapiens
cagcacaacagacgccctggcggtag

SEQ ID NO: 27569 - DNA, 26 bp, Homo sapiens
agcacaacagacgccctggcggtagg

SEQ ID NO: 27570 - DNA, 26 bp, Homo sapiens
gcacaacagacgccctggcggtaggg

SEQ ID NO: 27571 - DNA, 26 bp, Homo sapiens
cacaacagacgccctggcggtaggga

SEQ ID NO: 27572 - DNA, 26 bp, Homo sapiens
acaacagacgccctggcggtagggac

SEQ ID NO: 27573 - DNA, 26 bp, Homo sapiens
caacagacgccctggcggtagggaca

SEQ ID NO: 27574 - DNA, 26 bp, Homo sapiens
aacagacgccctggcggtagggacag

SEQ ID NO: 27575 - DNA, 26 bp, Homo sapiens
acagacgccctggcggtagggacagc

SEQ ID NO: 27576 - DNA, 26 bp, Homo sapiens
cagacgccctggcggtagggacagca

SEQ ID NO: 27577 - DNA, 26 bp, Homo sapiens
agacgccctggcggtagggacagcag

SEQ ID NO: 27578 - DNA, 26 bp, Homo sapiens
gacgccctggcggtagggacagcagg

SEQ ID NO: 27579 - DNA, 26 bp, Homo sapiens
acgccctggcggtagggacagcaggc

SEQ ID NO: 27580 - DNA, 26 bp, Homo sapiens
cgccctggcggtagggacagcaggcc

SEQ ID NO: 27581 - DNA, 26 bp, Homo sapiens
gccctggcggtagggacagcaggccc

SEQ ID NO: 27582 - DNA, 26 bp, Homo sapiens
ccctggcggtagggacagcaggccca

SEQ ID NO: 27583 - DNA, 26 bp, Homo sapiens
cctggcggtagggacagcaggcccag

SEQ ID NO: 27584 - DNA, 26 bp, Homo sapiens
ctggcggtagggacagcaggcccagc

SEQ ID NO: 27585 - DNA, 26 bp, Homo sapiens
tggcggtagggacagcaggcccagcc

SEQ ID NO: 27586 - DNA, 26 bp, Homo sapiens
ggcggtagggacagcaggcccagccc

SEQ ID NO: 27587 - DNA, 26 bp, Homo sapiens
gcggtagggacagcaggcccagccct

SEQ ID NO: 27588 - DNA, 26 bp, Homo sapiens
cggtagggacagcaggcccagccctg

SEQ ID NO: 27589 - DNA, 26 bp, Homo sapiens
ggtagggacagcaggcccagccctgt

SEQ ID NO: 27590 - DNA, 26 bp, Homo sapiens
gtagggacagcaggcccagccctgtc

SEQ ID NO: 27591 - DNA, 26 bp, Homo sapiens
tagggacagcaggcccagccctgtcg

SEQ ID NO: 27592 - DNA, 26 bp, Homo sapiens
agggacagcaggcccagccctgtcgg

SEQ ID NO: 27593 - DNA, 26 bp, Homo sapiens
gggacagcaggcccagccctgtcggt

SEQ ID NO: 27594 - DNA, 26 bp, Homo sapiens
ggacagcaggcccagccctgtcggtt

SEQ ID NO: 27595 - DNA, 26 bp, Homo sapiens
gacagcaggcccagccctgtcggttg

SEQ ID NO: 27596 - DNA, 26 bp, Homo sapiens
acagcaggcccagccctgtcggttgt

SEQ ID NO: 27597 - DNA, 26 bp, Homo sapiens
cagcaggcccagccctgtcggttgtc

SEQ ID NO: 27598 - DNA, 26 bp, Homo sapiens
agcaggcccagccctgtcggttgtct

SEQ ID NO: 27599 - DNA, 26 bp, Homo sapiens
gcaggcccagccctgtcggttgtctc

SEQ ID NO: 27600 - DNA, 26 bp, Homo sapiens
caggcccagccctgtcggttgtctcg

SEQ ID NO: 27601 - DNA, 26 bp, Homo sapiens
aggcccagccctgtcggttgtctcgg

SEQ ID NO: 27602 - DNA, 26 bp, Homo sapiens
ggcccagccctgtcggttgtctcggc

SEQ ID NO: 27603 - DNA, 26 bp, Homo sapiens
gcccagccctgtcggttgtctcggca

SEQ ID NO: 27604 - DNA, 26 bp, Homo sapiens
cccagccctgtcggttgtctcggcag

SEQ ID NO: 27605 - DNA, 26 bp, Homo sapiens
ccagccctgtcggttgtctcggcagc

SEQ ID NO: 27606 - DNA, 26 bp, Homo sapiens
cagccctgtcggttgtctcggcagca

SEQ ID NO: 27607 - DNA, 26 bp, Homo sapiens
agccctgtcggttgtctcggcagcag

SEQ ID NO: 27608 - DNA, 26 bp, Homo sapiens
gccctgtcggttgtctcggcagcagg

SEQ ID NO: 27609 - DNA, 26 bp, Homo sapiens
ccctgtcggttgtctcggcagcaggt

SEQ ID NO: 27610 - DNA, 26 bp, Homo sapiens
cctgtcggttgtctcggcagcaggtc

SEQ ID NO: 27611 - DNA, 26 bp, Homo sapiens
ctgtcggttgtctcggcagcaggtct

SEQ ID NO: 27612 - DNA, 26 bp, Homo sapiens
tgtcggttgtctcggcagcaggtctg

SEQ ID NO: 27613 - DNA, 26 bp, Homo sapiens
gtcggttgtctcggcagcaggtctgg

SEQ ID NO: 27614 - DNA, 26 bp, Homo sapiens
tcggttgtctcggcagcaggtctggt

SEQ ID NO: 27615 - DNA, 26 bp, Homo sapiens
cggttgtctcggcagcaggtctggtt

SEQ ID NO: 27616 - DNA, 26 bp, Homo sapiens
ggttgtctcggcagcaggtctggtta

SEQ ID NO: 27617 - DNA, 26 bp, Homo sapiens
gttgtctcggcagcaggtctggttat

SEQ ID NO: 27618 - DNA, 26 bp, Homo sapiens
ttgtctcggcagcaggtctggttatc

SEQ ID NO: 27619 - DNA, 26 bp, Homo sapiens
tgtctcggcagcaggtctggttatca

SEQ ID NO: 27620 - DNA, 26 bp, Homo sapiens
gtctcggcagcaggtctggttatcat

SEQ ID NO: 27621 - DNA, 26 bp, Homo sapiens
tctcggcagcaggtctggttatcatg

SEQ ID NO: 27622 - DNA, 26 bp, Homo sapiens
ctcggcagcaggtctggttatcatgg

SEQ ID NO: 27623 - DNA, 26 bp, Homo sapiens
tcggcagcaggtctggttatcatggc

SEQ ID NO: 27624 - DNA, 26 bp, Homo sapiens
cggcagcaggtctggttatcatggca

SEQ ID NO: 27625 - DNA, 26 bp, Homo sapiens
ggcagcaggtctggttatcatggcag

SEQ ID NO: 27626 - DNA, 26 bp, Homo sapiens
gcagcaggtctggttatcatggcaga

SEQ ID NO: 27627 - DNA, 26 bp, Homo sapiens
cagcaggtctggttatcatggcagaa

SEQ ID NO: 27628 - DNA, 26 bp, Homo sapiens
agcaggtctggttatcatggcagaag

SEQ ID NO: 27629 - DNA, 26 bp, Homo sapiens
gcaggtctggttatcatggcagaagt

SEQ ID NO: 27630 - DNA, 26 bp, Homo sapiens
caggtctggttatcatggcagaagtg

SEQ ID NO: 27631 - DNA, 26 bp, Homo sapiens
aggtctggttatcatggcagaagtgt

SEQ ID NO: 27632 - DNA, 26 bp, Homo sapiens
ggtctggttatcatggcagaagtgtc

SEQ ID NO: 27633 - DNA, 26 bp, Homo sapiens
gtctggttatcatggcagaagtgtcc

SEQ ID NO: 27634 - DNA, 26 bp, Homo sapiens
tctggttatcatggcagaagtgtcct

SEQ ID NO: 27635 - DNA, 26 bp, Homo sapiens
ctggttatcatggcagaagtgtcctt

SEQ ID NO: 27636 - DNA, 26 bp, Homo sapiens
tggttatcatggcagaagtgtccttc

SEQ ID NO: 27637 - DNA, 26 bp, Homo sapiens
ggttatcatggcagaagtgtccttcc

SEQ ID NO: 27638 - DNA, 26 bp, Homo sapiens
gttatcatggcagaagtgtccttccc

SEQ ID NO: 27639 - DNA, 26 bp, Homo sapiens
ttatcatggcagaagtgtccttcccc

SEQ ID NO: 27640 - DNA, 26 bp, Homo sapiens
tatcatggcagaagtgtccttcccca

SEQ ID NO: 27641 - DNA, 26 bp, Homo sapiens
atcatggcagaagtgtccttccccac

SEQ ID NO: 27642 - DNA, 26 bp, Homo sapiens
tcatggcagaagtgtccttccccaca

SEQ ID NO: 27643 - DNA, 26 bp, Homo sapiens
catggcagaagtgtccttccccacac

SEQ ID NO: 27644 - DNA, 26 bp, Homo sapiens
atggcagaagtgtccttccccacact

SEQ ID NO: 27645 - DNA, 26 bp, Homo sapiens
tggcagaagtgtccttccccacactc

SEQ ID NO: 27646 - DNA, 26 bp, Homo sapiens
ggcagaagtgtccttccccacactcc

SEQ ID NO: 27647 - DNA, 26 bp, Homo sapiens
gcagaagtgtccttccccacactcca

SEQ ID NO: 27648 - DNA, 26 bp, Homo sapiens
cagaagtgtccttccccacactccac

SEQ ID NO: 27649 - DNA, 26 bp, Homo sapiens
agaagtgtccttccccacactccacg

SEQ ID NO: 27650 - DNA, 26 bp, Homo sapiens
gaagtgtccttccccacactccacgt

SEQ ID NO: 27651 - DNA, 26 bp, Homo sapiens
aagtgtccttccccacactccacgtc

SEQ ID NO: 27652 - DNA, 26 bp, Homo sapiens
agtgtccttccccacactccacgtcc

SEQ ID NO: 27653 - DNA, 26 bp, Homo sapiens
gtgtccttccccacactccacgtcct

SEQ ID NO: 27654 - DNA, 26 bp, Homo sapiens
tgtccttccccacactccacgtcctt

SEQ ID NO: 27655 - DNA, 26 bp, Homo sapiens
gtccttccccacactccacgtccttc

SEQ ID NO: 27656 - DNA, 26 bp, Homo sapiens
tccttccccacactccacgtccttca

SEQ ID NO: 27657 - DNA, 26 bp, Homo sapiens
ccttccccacactccacgtccttcac

SEQ ID NO: 27658 - DNA, 26 bp, Homo sapiens
cttccccacactccacgtccttcaca

SEQ ID NO: 27659 - DNA, 26 bp, Homo sapiens
ttccccacactccacgtccttcacac

SEQ ID NO: 27660 - DNA, 26 bp, Homo sapiens
tccccacactccacgtccttcacacc

SEQ ID NO: 27661 - DNA, 26 bp, Homo sapiens
ccccacactccacgtccttcacaccc

SEQ ID NO: 27662 - DNA, 26 bp, Homo sapiens
cccacactccacgtccttcacaccca

SEQ ID NO: 27663 - DNA, 26 bp, Homo sapiens
ccacactccacgtccttcacacccac

SEQ ID NO: 27664 - DNA, 26 bp, Homo sapiens
cacactccacgtccttcacacccacg

SEQ ID NO: 27665 - DNA, 26 bp, Homo sapiens
acactccacgtccttcacacccacgt

SEQ ID NO: 27666 - DNA, 26 bp, Homo sapiens
cactccacgtccttcacacccacgtg

SEQ ID NO: 27667 - DNA, 26 bp, Homo sapiens
actccacgtccttcacacccacgtga

SEQ ID NO: 27668 - DNA, 26 bp, Homo sapiens
ctccacgtccttcacacccacgtgag

SEQ ID NO: 27669 - DNA, 26 bp, Homo sapiens
tccacgtccttcacacccacgtgagg

SEQ ID NO: 27670 - DNA, 26 bp, Homo sapiens
ccacgtccttcacacccacgtgaggg

SEQ ID NO: 27671 - DNA, 26 bp, Homo sapiens
cacgtccttcacacccacgtgagggc

SEQ ID NO: 27672 - DNA, 26 bp, Homo sapiens
acgtccttcacacccacgtgagggct

SEQ ID NO: 27673 - DNA, 26 bp, Homo sapiens
cgtccttcacacccacgtgagggcta

SEQ ID NO: 27674 - DNA, 26 bp, Homo sapiens
gtccttcacacccacgtgagggctac

SEQ ID NO: 27675 - DNA, 26 bp, Homo sapiens
tccttcacacccacgtgagggctacg

SEQ ID NO: 27676 - DNA, 26 bp, Homo sapiens
ccttcacacccacgtgagggctacgg

SEQ ID NO: 27677 - DNA, 26 bp, Homo sapiens
cttcacacccacgtgagggctacggg

SEQ ID NO: 27678 - DNA, 26 bp, Homo sapiens
ttcacacccacgtgagggctacgggc

SEQ ID NO: 27679 - DNA, 26 bp, Homo sapiens
tcacacccacgtgagggctacgggcc

SEQ ID NO: 27680 - DNA, 26 bp, Homo sapiens
cacacccacgtgagggctacgggcca

SEQ ID NO: 27681 - DNA, 26 bp, Homo sapiens
acacccacgtgagggctacgggccag

SEQ ID NO: 27682 - DNA, 26 bp, Homo sapiens
cacccacgtgagggctacgggccagg

SEQ ID NO: 27683 - DNA, 26 bp, Homo sapiens
acccacgtgagggctacgggccagga

SEQ ID NO: 27684 - DNA, 26 bp, Homo sapiens
cccacgtgagggctacgggccaggaa

SEQ ID NO: 27685 - DNA, 26 bp, Homo sapiens
ccacgtgagggctacgggccaggaag

SEQ ID NO: 27686 - DNA, 26 bp, Homo sapiens
cacgtgagggctacgggccaggaagg

SEQ ID NO: 27687 - DNA, 26 bp, Homo sapiens
acgtgagggctacgggccaggaaggt

SEQ ID NO: 27688 - DNA, 26 bp, Homo sapiens
cgtgagggctacgggccaggaaggtg

SEQ ID NO: 27689 - DNA, 26 bp, Homo sapiens
gtgagggctacgggccaggaaggtgg

SEQ ID NO: 27690 - DNA, 26 bp, Homo sapiens
tgagggctacgggccaggaaggtggc

SEQ ID NO: 27691 - DNA, 26 bp, Homo sapiens
gagggctacgggccaggaaggtggca

SEQ ID NO: 27692 - DNA, 26 bp, Homo sapiens
agggctacgggccaggaaggtggcag

SEQ ID NO: 27693 - DNA, 26 bp, Homo sapiens
gggctacgggccaggaaggtggcagg

SEQ ID NO: 27694 - DNA, 26 bp, Homo sapiens
ggctacgggccaggaaggtggcaggc

SEQ ID NO: 27695 - DNA, 26 bp, Homo sapiens
gctacgggccaggaaggtggcaggct

SEQ ID NO: 27696 - DNA, 26 bp, Homo sapiens
ctacgggccaggaaggtggcaggctg

SEQ ID NO: 27697 - DNA, 26 bp, Homo sapiens
tacgggccaggaaggtggcaggctgg

SEQ ID NO: 27698 - DNA, 26 bp, Homo sapiens
acgggccaggaaggtggcaggctggg

SEQ ID NO: 27699 - DNA, 26 bp, Homo sapiens
cgggccaggaaggtggcaggctgggc

SEQ ID NO: 27700 - DNA, 26 bp, Homo sapiens
gggccaggaaggtggcaggctgggca

SEQ ID NO: 27701 - DNA, 26 bp, Homo sapiens
ggccaggaaggtggcaggctgggcag

SEQ ID NO: 27702 - DNA, 26 bp, Homo sapiens
gccaggaaggtggcaggctgggcaga

SEQ ID NO: 27703 - DNA, 26 bp, Homo sapiens
ccaggaaggtggcaggctgggcagag

SEQ ID NO: 27704 - DNA, 26 bp, Homo sapiens
caggaaggtggcaggctgggcagaga

SEQ ID NO: 27705 - DNA, 26 bp, Homo sapiens
aggaaggtggcaggctgggcagagac

SEQ ID NO: 27706 - DNA, 26 bp, Homo sapiens
ggaaggtggcaggctgggcagagacc

SEQ ID NO: 27707 - DNA, 26 bp, Homo sapiens
gaaggtggcaggctgggcagagacca

SEQ ID NO: 27708 - DNA, 26 bp, Homo sapiens
aaggtggcaggctgggcagagaccac

SEQ ID NO: 27709 - DNA, 26 bp, Homo sapiens
aggtggcaggctgggcagagaccact

SEQ ID NO: 27710 - DNA, 26 bp, Homo sapiens
ggtggcaggctgggcagagaccactt

SEQ ID NO: 27711 - DNA, 26 bp, Homo sapiens
gtggcaggctgggcagagaccacttc

SEQ ID NO: 27712 - DNA, 26 bp, Homo sapiens
tggcaggctgggcagagaccacttcc

SEQ ID NO: 27713 - DNA, 26 bp, Homo sapiens
ggcaggctgggcagagaccacttcct

SEQ ID NO: 27714 - DNA, 26 bp, Homo sapiens
gcaggctgggcagagaccacttcctt

SEQ ID NO: 27715 - DNA, 26 bp, Homo sapiens
caggctgggcagagaccacttccttc

SEQ ID NO: 27716 - DNA, 26 bp, Homo sapiens
aggctgggcagagaccacttccttct

SEQ ID NO: 27717 - DNA, 26 bp, Homo sapiens
ggctgggcagagaccacttccttctc

SEQ ID NO: 27718 - DNA, 26 bp, Homo sapiens
gctgggcagagaccacttccttctcg

SEQ ID NO: 27719 - DNA, 26 bp, Homo sapiens
ctgggcagagaccacttccttctcgc

SEQ ID NO: 27720 - DNA, 26 bp, Homo sapiens
tgggcagagaccacttccttctcgca

SEQ ID NO: 27721 - DNA, 26 bp, Homo sapiens
gggcagagaccacttccttctcgcag

SEQ ID NO: 27722 - DNA, 26 bp, Homo sapiens
ggcagagaccacttccttctcgcagg

SEQ ID NO: 27723 - DNA, 26 bp, Homo sapiens
gcagagaccacttccttctcgcagga

SEQ ID NO: 27724 - DNA, 26 bp, Homo sapiens
cagagaccacttccttctcgcaggat

SEQ ID NO: 27725 - DNA, 26 bp, Homo sapiens
agagaccacttccttctcgcaggatc

SEQ ID NO: 27726 - DNA, 26 bp, Homo sapiens
gagaccacttccttctcgcaggatcg

SEQ ID NO: 27727 - DNA, 26 bp, Homo sapiens
agaccacttccttctcgcaggatcga

SEQ ID NO: 27728 - DNA, 26 bp, Homo sapiens
gaccacttccttctcgcaggatcgag

SEQ ID NO: 27729 - DNA, 26 bp, Homo sapiens
accacttccttctcgcaggatcgagc

SEQ ID NO: 27730 - DNA, 26 bp, Homo sapiens
ccacttccttctcgcaggatcgagcc

SEQ ID NO: 27731 - DNA, 26 bp, Homo sapiens
cacttccttctcgcaggatcgagcct

SEQ ID NO: 27732 - DNA, 26 bp, Homo sapiens
acttccttctcgcaggatcgagcctt

SEQ ID NO: 27733 - DNA, 26 bp, Homo sapiens
cttccttctcgcaggatcgagccttc

SEQ ID NO: 27734 - DNA, 26 bp, Homo sapiens
ttccttctcgcaggatcgagccttca

SEQ ID NO: 27735 - DNA, 26 bp, Homo sapiens
tccttctcgcaggatcgagccttcac

SEQ ID NO: 27736 - DNA, 26 bp, Homo sapiens
ccttctcgcaggatcgagccttcacg

SEQ ID NO: 27737 - DNA, 26 bp, Homo sapiens
cttctcgcaggatcgagccttcacgt

SEQ ID NO: 27738 - DNA, 26 bp, Homo sapiens
ttctcgcaggatcgagccttcacgtt

SEQ ID NO: 27739 - DNA, 26 bp, Homo sapiens
tctcgcaggatcgagccttcacgttg

SEQ ID NO: 27740 - DNA, 26 bp, Homo sapiens
ctcgcaggatcgagccttcacgttgc

SEQ ID NO: 27741 - DNA, 26 bp, Homo sapiens
tcgcaggatcgagccttcacgttgca

SEQ ID NO: 27742 - DNA, 26 bp, Homo sapiens
cgcaggatcgagccttcacgttgcag

SEQ ID NO: 27743 - DNA, 26 bp, Homo sapiens
gcaggatcgagccttcacgttgcagg

SEQ ID NO: 27744 - DNA, 26 bp, Homo sapiens
caggatcgagccttcacgttgcaggt

SEQ ID NO: 27745 - DNA, 26 bp, Homo sapiens
aggatcgagccttcacgttgcaggtg

SEQ ID NO: 27746 - DNA, 26 bp, Homo sapiens
ggatcgagccttcacgttgcaggtgt

SEQ ID NO: 27747 - DNA, 26 bp, Homo sapiens
gatcgagccttcacgttgcaggtgta

SEQ ID NO: 27748 - DNA, 26 bp, Homo sapiens
atcgagccttcacgttgcaggtgtag

SEQ ID NO: 27749 - DNA, 26 bp, Homo sapiens
tcgagccttcacgttgcaggtgtagc

SEQ ID NO: 27750 - DNA, 26 bp, Homo sapiens
cgagccttcacgttgcaggtgtagcc

SEQ ID NO: 27751 - DNA, 26 bp, Homo sapiens
gagccttcacgttgcaggtgtagcca

SEQ ID NO: 27752 - DNA, 26 bp, Homo sapiens
agccttcacgttgcaggtgtagccag

SEQ ID NO: 27753 - DNA, 26 bp, Homo sapiens
gccttcacgttgcaggtgtagccagc

SEQ ID NO: 27754 - DNA, 26 bp, Homo sapiens
ccttcacgttgcaggtgtagccagcc

SEQ ID NO: 27755 - DNA, 26 bp, Homo sapiens
cttcacgttgcaggtgtagccagccg

SEQ ID NO: 27756 - DNA, 26 bp, Homo sapiens
ttcacgttgcaggtgtagccagccgg

SEQ ID NO: 27757 - DNA, 26 bp, Homo sapiens
tcacgttgcaggtgtagccagccggg

SEQ ID NO: 27758 - DNA, 26 bp, Homo sapiens
cacgttgcaggtgtagccagccgggc

SEQ ID NO: 27759 - DNA, 26 bp, Homo sapiens
acgttgcaggtgtagccagccgggca

SEQ ID NO: 27760 - DNA, 26 bp, Homo sapiens
cgttgcaggtgtagccagccgggcag

SEQ ID NO: 27761 - DNA, 26 bp, Homo sapiens
gttgcaggtgtagccagccgggcagc

SEQ ID NO: 27762 - DNA, 26 bp, Homo sapiens
ttgcaggtgtagccagccgggcagca

SEQ ID NO: 27763 - DNA, 26 bp, Homo sapiens
tgcaggtgtagccagccgggcagcag

SEQ ID NO: 27764 - DNA, 26 bp, Homo sapiens
gcaggtgtagccagccgggcagcagt

SEQ ID NO: 27765 - DNA, 26 bp, Homo sapiens
caggtgtagccagccgggcagcagtg

SEQ ID NO: 27766 - DNA, 26 bp, Homo sapiens
aggtgtagccagccgggcagcagtgc

SEQ ID NO: 27767 - DNA, 26 bp, Homo sapiens
ggtgtagccagccgggcagcagtgct

SEQ ID NO: 27768 - DNA, 26 bp, Homo sapiens
gtgtagccagccgggcagcagtgctg

SEQ ID NO: 27769 - DNA, 26 bp, Homo sapiens
tgtagccagccgggcagcagtgctgg

SEQ ID NO: 27770 - DNA, 26 bp, Homo sapiens
gtagccagccgggcagcagtgctggc

SEQ ID NO: 27771 - DNA, 26 bp, Homo sapiens
tagccagccgggcagcagtgctggcg

SEQ ID NO: 27772 - DNA, 26 bp, Homo sapiens
agccagccgggcagcagtgctggcga

SEQ ID NO: 27773 - DNA, 26 bp, Homo sapiens
gccagccgggcagcagtgctggcgat

SEQ ID NO: 27774 - DNA, 26 bp, Homo sapiens
ccagccgggcagcagtgctggcgatc

SEQ ID NO: 27775 - DNA, 26 bp, Homo sapiens
cagccgggcagcagtgctggcgatcc

SEQ ID NO: 27776 - DNA, 26 bp, Homo sapiens
agccgggcagcagtgctggcgatcct

SEQ ID NO: 27777 - DNA, 26 bp, Homo sapiens
gccgggcagcagtgctggcgatcctc

SEQ ID NO: 27778 - DNA, 26 bp, Homo sapiens
ccgggcagcagtgctggcgatcctcg

SEQ ID NO: 27779 - DNA, 26 bp, Homo sapiens
cgggcagcagtgctggcgatcctcgc

SEQ ID NO: 27780 - DNA, 26 bp, Homo sapiens
gggcagcagtgctggcgatcctcgca

SEQ ID NO: 27781 - DNA, 26 bp, Homo sapiens
ggcagcagtgctggcgatcctcgcag

SEQ ID NO: 27782 - DNA, 26 bp, Homo sapiens
gcagcagtgctggcgatcctcgcagc

SEQ ID NO: 27783 - DNA, 26 bp, Homo sapiens
cagcagtgctggcgatcctcgcagca

SEQ ID NO: 27784 - DNA, 26 bp, Homo sapiens
agcagtgctggcgatcctcgcagcac

SEQ ID NO: 27785 - DNA, 26 bp, Homo sapiens
gcagtgctggcgatcctcgcagcaca

SEQ ID NO: 27786 - DNA, 26 bp, Homo sapiens
cagtgctggcgatcctcgcagcacac

SEQ ID NO: 27787 - DNA, 26 bp, Homo sapiens
agtgctggcgatcctcgcagcacaca

SEQ ID NO: 27788 - DNA, 26 bp, Homo sapiens
gtgctggcgatcctcgcagcacacag

SEQ ID NO: 27789 - DNA, 26 bp, Homo sapiens
tgctggcgatcctcgcagcacacagc

SEQ ID NO: 27790 - DNA, 26 bp, Homo sapiens
gctggcgatcctcgcagcacacagca

SEQ ID NO: 27791 - DNA, 26 bp, Homo sapiens
ctggcgatcctcgcagcacacagcat

SEQ ID NO: 27792 - DNA, 26 bp, Homo sapiens
tggcgatcctcgcagcacacagcatg

SEQ ID NO: 27793 - DNA, 26 bp, Homo sapiens
ggcgatcctcgcagcacacagcatgg

SEQ ID NO: 27794 - DNA, 26 bp, Homo sapiens
gcgatcctcgcagcacacagcatggg

SEQ ID NO: 27795 - DNA, 26 bp, Homo sapiens
cgatcctcgcagcacacagcatgggg

SEQ ID NO: 27796 - DNA, 26 bp, Homo sapiens
gatcctcgcagcacacagcatggggc

SEQ ID NO: 27797 - DNA, 26 bp, Homo sapiens
atcctcgcagcacacagcatggggca

SEQ ID NO: 27798 - DNA, 26 bp, Homo sapiens
tcctcgcagcacacagcatggggcaa

SEQ ID NO: 27799 - DNA, 26 bp, Homo sapiens
cctcgcagcacacagcatggggcaac

SEQ ID NO: 27800 - DNA, 26 bp, Homo sapiens
ctcgcagcacacagcatggggcaact

SEQ ID NO: 27801 - DNA, 26 bp, Homo sapiens
tcgcagcacacagcatggggcaactg

SEQ ID NO: 27802 - DNA, 26 bp, Homo sapiens
cgcagcacacagcatggggcaactgg

SEQ ID NO: 27803 - DNA, 26 bp, Homo sapiens
gcagcacacagcatggggcaactggc

SEQ ID NO: 27804 - DNA, 26 bp, Homo sapiens
cagcacacagcatggggcaactggca

SEQ ID NO: 27805 - DNA, 26 bp, Homo sapiens
agcacacagcatggggcaactggcag

SEQ ID NO: 27806 - DNA, 26 bp, Homo sapiens
gcacacagcatggggcaactggcagc

SEQ ID NO: 27807 - DNA, 26 bp, Homo sapiens
cacacagcatggggcaactggcagca

SEQ ID NO: 27808 - DNA, 26 bp, Homo sapiens
acacagcatggggcaactggcagcag

SEQ ID NO: 27809 - DNA, 26 bp, Homo sapiens
cacagcatggggcaactggcagcagg

SEQ ID NO: 27810 - DNA, 26 bp, Homo sapiens
acagcatggggcaactggcagcaggc

SEQ ID NO: 27811 - DNA, 26 bp, Homo sapiens
cagcatggggcaactggcagcaggcc

SEQ ID NO: 27812 - DNA, 26 bp, Homo sapiens
agcatggggcaactggcagcaggccc

SEQ ID NO: 27813 - DNA, 26 bp, Homo sapiens
gcatggggcaactggcagcaggccca

SEQ ID NO: 27814 - DNA, 26 bp, Homo sapiens
catggggcaactggcagcaggcccag

SEQ ID NO: 27815 - DNA, 26 bp, Homo sapiens
atggggcaactggcagcaggcccagc

SEQ ID NO: 27816 - DNA, 26 bp, Homo sapiens
tggggcaactggcagcaggcccagct

SEQ ID NO: 27817 - DNA, 26 bp, Homo sapiens
ggggcaactggcagcaggcccagctc

SEQ ID NO: 27818 - DNA, 26 bp, Homo sapiens
gggcaactggcagcaggcccagctcc

SEQ ID NO: 27819 - DNA, 26 bp, Homo sapiens
ggcaactggcagcaggcccagctccc

SEQ ID NO: 27820 - DNA, 26 bp, Homo sapiens
gcaactggcagcaggcccagctccca

SEQ ID NO: 27821 - DNA, 26 bp, Homo sapiens
caactggcagcaggcccagctcccac

SEQ ID NO: 27822 - DNA, 26 bp, Homo sapiens
aactggcagcaggcccagctcccacc

SEQ ID NO: 27823 - DNA, 26 bp, Homo sapiens
actggcagcaggcccagctcccaccc

SEQ ID NO: 27824 - DNA, 26 bp, Homo sapiens
ctggcagcaggcccagctcccaccca

SEQ ID NO: 27825 - DNA, 26 bp, Homo sapiens
tggcagcaggcccagctcccacccag

SEQ ID NO: 27826 - DNA, 26 bp, Homo sapiens
ggcagcaggcccagctcccacccagg

SEQ ID NO: 27827 - DNA, 26 bp, Homo sapiens
gcagcaggcccagctcccacccaggc

SEQ ID NO: 27828 - DNA, 26 bp, Homo sapiens
cagcaggcccagctcccacccaggct

SEQ ID NO: 27829 - DNA, 26 bp, Homo sapiens
agcaggcccagctcccacccaggctc

SEQ ID NO: 27830 - DNA, 26 bp, Homo sapiens
gcaggcccagctcccacccaggctcg

SEQ ID NO: 27831 - DNA, 26 bp, Homo sapiens
caggcccagctcccacccaggctcgg

SEQ ID NO: 27832 - DNA, 26 bp, Homo sapiens
aggcccagctcccacccaggctcggg

SEQ ID NO: 27833 - DNA, 26 bp, Homo sapiens
ggcccagctcccacccaggctcgggc

SEQ ID NO: 27834 - DNA, 26 bp, Homo sapiens
gcccagctcccacccaggctcgggca

SEQ ID NO: 27835 - DNA, 26 bp, Homo sapiens
cccagctcccacccaggctcgggcag

SEQ ID NO: 27836 - DNA, 26 bp, Homo sapiens
ccagctcccacccaggctcgggcagc

SEQ ID NO: 27837 - DNA, 26 bp, Homo sapiens
cagctcccacccaggctcgggcagca

SEQ ID NO: 27838 - DNA, 26 bp, Homo sapiens
agctcccacccaggctcgggcagcag

SEQ ID NO: 27839 - DNA, 26 bp, Homo sapiens
gctcccacccaggctcgggcagcagg

SEQ ID NO: 27840 - DNA, 26 bp, Homo sapiens
ctcccacccaggctcgggcagcaggt

SEQ ID NO: 27841 - DNA, 26 bp, Homo sapiens
tcccacccaggctcgggcagcaggtc

SEQ ID NO: 27842 - DNA, 26 bp, Homo sapiens
cccacccaggctcgggcagcaggtct

SEQ ID NO: 27843 - DNA, 26 bp, Homo sapiens
ccacccaggctcgggcagcaggtctg

SEQ ID NO: 27844 - DNA, 26 bp, Homo sapiens
cacccaggctcgggcagcaggtctgc

SEQ ID NO: 27845 - DNA, 26 bp, Homo sapiens
acccaggctcgggcagcaggtctgcc

SEQ ID NO: 27846 - DNA, 26 bp, Homo sapiens
cccaggctcgggcagcaggtctgccc

SEQ ID NO: 27847 - DNA, 26 bp, Homo sapiens
ccaggctcgggcagcaggtctgcccc

SEQ ID NO: 27848 - DNA, 26 bp, Homo sapiens
caggctcgggcagcaggtctgcccca

SEQ ID NO: 27849 - DNA, 26 bp, Homo sapiens
aggctcgggcagcaggtctgccccac

SEQ ID NO: 27850 - DNA, 26 bp, Homo sapiens
ggctcgggcagcaggtctgccccacc

SEQ ID NO: 27851 - DNA, 26 bp, Homo sapiens
gctcgggcagcaggtctgccccaccg

SEQ ID NO: 27852 - DNA, 26 bp, Homo sapiens
ctcgggcagcaggtctgccccaccgg

SEQ ID NO: 27853 - DNA, 26 bp, Homo sapiens
tcgggcagcaggtctgccccaccggg

SEQ ID NO: 27854 - DNA, 26 bp, Homo sapiens
cgggcagcaggtctgccccaccgggc

SEQ ID NO: 27855 - DNA, 26 bp, Homo sapiens
gggcagcaggtctgccccaccgggca

SEQ ID NO: 27856 - DNA, 26 bp, Homo sapiens
ggcagcaggtctgccccaccgggcag

SEQ ID NO: 27857 - DNA, 26 bp, Homo sapiens
gcagcaggtctgccccaccgggcagc

SEQ ID NO: 27858 - DNA, 26 bp, Homo sapiens
cagcaggtctgccccaccgggcagct

SEQ ID NO: 27859 - DNA, 26 bp, Homo sapiens
agcaggtctgccccaccgggcagctg

SEQ ID NO: 27860 - DNA, 26 bp, Homo sapiens
gcaggtctgccccaccgggcagctgg

SEQ ID NO: 27861 - DNA, 26 bp, Homo sapiens
caggtctgccccaccgggcagctggt

SEQ ID NO: 27862 - DNA, 26 bp, Homo sapiens
aggtctgccccaccgggcagctggtg

SEQ ID NO: 27863 - DNA, 26 bp, Homo sapiens
ggtctgccccaccgggcagctggtgt

SEQ ID NO: 27864 - DNA, 26 bp, Homo sapiens
gtctgccccaccgggcagctggtgtg

SEQ ID NO: 27865 - DNA, 26 bp, Homo sapiens
tctgccccaccgggcagctggtgtgc

SEQ ID NO: 27866 - DNA, 26 bp, Homo sapiens
ctgccccaccgggcagctggtgtgct

SEQ ID NO: 27867 - DNA, 26 bp, Homo sapiens
tgccccaccgggcagctggtgtgctg

SEQ ID NO: 27868 - DNA, 26 bp, Homo sapiens
gccccaccgggcagctggtgtgctgg

SEQ ID NO: 27869 - DNA, 26 bp, Homo sapiens
ccccaccgggcagctggtgtgctggt

SEQ ID NO: 27870 - DNA, 26 bp, Homo sapiens
cccaccgggcagctggtgtgctggtc

SEQ ID NO: 27871 - DNA, 26 bp, Homo sapiens
ccaccgggcagctggtgtgctggtca

SEQ ID NO: 27872 - DNA, 26 bp, Homo sapiens
caccgggcagctggtgtgctggtcac

SEQ ID NO: 27873 - DNA, 26 bp, Homo sapiens
accgggcagctggtgtgctggtcaca

SEQ ID NO: 27874 - DNA, 26 bp, Homo sapiens
ccgggcagctggtgtgctggtcacag

SEQ ID NO: 27875 - DNA, 26 bp, Homo sapiens
cgggcagctggtgtgctggtcacagc

SEQ ID NO: 27876 - DNA, 26 bp, Homo sapiens
gggcagctggtgtgctggtcacagcc

SEQ ID NO: 27877 - DNA, 26 bp, Homo sapiens
ggcagctggtgtgctggtcacagccg

SEQ ID NO: 27878 - DNA, 26 bp, Homo sapiens
gcagctggtgtgctggtcacagccga

SEQ ID NO: 27879 - DNA, 26 bp, Homo sapiens
cagctggtgtgctggtcacagccgat

SEQ ID NO: 27880 - DNA, 26 bp, Homo sapiens
agctggtgtgctggtcacagccgatg

SEQ ID NO: 27881 - DNA, 26 bp, Homo sapiens
gctggtgtgctggtcacagccgatgt

SEQ ID NO: 27882 - DNA, 26 bp, Homo sapiens
ctggtgtgctggtcacagccgatgtc

SEQ ID NO: 27883 - DNA, 26 bp, Homo sapiens
tggtgtgctggtcacagccgatgtct

SEQ ID NO: 27884 - DNA, 26 bp, Homo sapiens
ggtgtgctggtcacagccgatgtctc

SEQ ID NO: 27885 - DNA, 26 bp, Homo sapiens
gtgtgctggtcacagccgatgtctct

SEQ ID NO: 27886 - DNA, 26 bp, Homo sapiens
tgtgctggtcacagccgatgtctctg

SEQ ID NO: 27887 - DNA, 26 bp, Homo sapiens
gtgctggtcacagccgatgtctctgg

SEQ ID NO: 27888 - DNA, 26 bp, Homo sapiens
tgctggtcacagccgatgtctctggg

SEQ ID NO: 27889 - DNA, 26 bp, Homo sapiens
gctggtcacagccgatgtctctgggg

SEQ ID NO: 27890 - DNA, 26 bp, Homo sapiens
ctggtcacagccgatgtctctggggt

SEQ ID NO: 27891 - DNA, 26 bp, Homo sapiens
tggtcacagccgatgtctctggggtg

SEQ ID NO: 27892 - DNA, 26 bp, Homo sapiens
ggtcacagccgatgtctctggggtgg

SEQ ID NO: 27893 - DNA, 26 bp, Homo sapiens
gtcacagccgatgtctctggggtggg

SEQ ID NO: 27894 - DNA, 26 bp, Homo sapiens
tcacagccgatgtctctggggtggga

SEQ ID NO: 27895 - DNA, 26 bp, Homo sapiens
cacagccgatgtctctggggtgggat

SEQ ID NO: 27896 - DNA, 26 bp, Homo sapiens
acagccgatgtctctggggtgggata

SEQ ID NO: 27897 - DNA, 26 bp, Homo sapiens
cagccgatgtctctggggtgggataa

SEQ ID NO: 27898 - DNA, 26 bp, Homo sapiens
agccgatgtctctggggtgggataag

SEQ ID NO: 27899 - DNA, 26 bp, Homo sapiens
gccgatgtctctggggtgggataagg

SEQ ID NO: 27900 - DNA, 26 bp, Homo sapiens
ccgatgtctctggggtgggataagga

SEQ ID NO: 27901 - DNA, 26 bp, Homo sapiens
cgatgtctctggggtgggataaggaa

SEQ ID NO: 27902 - DNA, 26 bp, Homo sapiens
gatgtctctggggtgggataaggaag

SEQ ID NO: 27903 - DNA, 26 bp, Homo sapiens
atgtctctggggtgggataaggaagc

SEQ ID NO: 27904 - DNA, 26 bp, Homo sapiens
tgtctctggggtgggataaggaagcc

SEQ ID NO: 27905 - DNA, 26 bp, Homo sapiens
gtctctggggtgggataaggaagccc

SEQ ID NO: 27906 - DNA, 26 bp, Homo sapiens
tctctggggtgggataaggaagcccg

SEQ ID NO: 27907 - DNA, 26 bp, Homo sapiens
ctctggggtgggataaggaagcccgg

SEQ ID NO: 27908 - DNA, 26 bp, Homo sapiens
tctggggtgggataaggaagcccggc

SEQ ID NO: 27909 - DNA, 26 bp, Homo sapiens
ctggggtgggataaggaagcccggcg

SEQ ID NO: 27910 - DNA, 26 bp, Homo sapiens
tggggtgggataaggaagcccggcgg

SEQ ID NO: 27911 - DNA, 26 bp, Homo sapiens
ggggtgggataaggaagcccggcggg

SEQ ID NO: 27912 - DNA, 26 bp, Homo sapiens
gggtgggataaggaagcccggcgggc

SEQ ID NO: 27913 - DNA, 26 bp, Homo sapiens
ggtgggataaggaagcccggcgggca

SEQ ID NO: 27914 - DNA, 26 bp, Homo sapiens
gtgggataaggaagcccggcgggcag

SEQ ID NO: 27915 - DNA, 26 bp, Homo sapiens
tgggataaggaagcccggcgggcagg

SEQ ID NO: 27916 - DNA, 26 bp, Homo sapiens
gggataaggaagcccggcgggcaggc

SEQ ID NO: 27917 - DNA, 26 bp, Homo sapiens
ggataaggaagcccggcgggcaggca

SEQ ID NO: 27918 - DNA, 26 bp, Homo sapiens
gataaggaagcccggcgggcaggcat

SEQ ID NO: 27919 - DNA, 26 bp, Homo sapiens
ataaggaagcccggcgggcaggcatc

SEQ ID NO: 27920 - DNA, 26 bp, Homo sapiens
taaggaagcccggcgggcaggcatct

SEQ ID NO: 27921 - DNA, 26 bp, Homo sapiens
aaggaagcccggcgggcaggcatctt

SEQ ID NO: 27922 - DNA, 26 bp, Homo sapiens
aggaagcccggcgggcaggcatcttc

SEQ ID NO: 27923 - DNA, 26 bp, Homo sapiens
ggaagcccggcgggcaggcatcttct

SEQ ID NO: 27924 - DNA, 26 bp, Homo sapiens
gaagcccggcgggcaggcatcttctc

SEQ ID NO: 27925 - DNA, 26 bp, Homo sapiens
aagcccggcgggcaggcatcttctcc

SEQ ID NO: 27926 - DNA, 26 bp, Homo sapiens
agcccggcgggcaggcatcttctcca

SEQ ID NO: 27927 - DNA, 26 bp, Homo sapiens
gcccggcgggcaggcatcttctccag

SEQ ID NO: 27928 - DNA, 26 bp, Homo sapiens
cccggcgggcaggcatcttctccagt

SEQ ID NO: 27929 - DNA, 26 bp, Homo sapiens
ccggcgggcaggcatcttctccagtc

SEQ ID NO: 27930 - DNA, 26 bp, Homo sapiens
cggcgggcaggcatcttctccagtcc

SEQ ID NO: 27931 - DNA, 26 bp, Homo sapiens
ggcgggcaggcatcttctccagtcca

SEQ ID NO: 27932 - DNA, 26 bp, Homo sapiens
gcgggcaggcatcttctccagtccag

SEQ ID NO: 27933 - DNA, 26 bp, Homo sapiens
cgggcaggcatcttctccagtccagc

SEQ ID NO: 27934 - DNA, 26 bp, Homo sapiens
gggcaggcatcttctccagtccagcc

SEQ ID NO: 27935 - DNA, 26 bp, Homo sapiens
ggcaggcatcttctccagtccagcca

SEQ ID NO: 27936 - DNA, 26 bp, Homo sapiens
gcaggcatcttctccagtccagccac

SEQ ID NO: 27937 - DNA, 26 bp, Homo sapiens
caggcatcttctccagtccagccacg

SEQ ID NO: 27938 - DNA, 26 bp, Homo sapiens
aggcatcttctccagtccagccacga

SEQ ID NO: 27939 - DNA, 26 bp, Homo sapiens
ggcatcttctccagtccagccacgat

SEQ ID NO: 27940 - DNA, 26 bp, Homo sapiens
gcatcttctccagtccagccacgatc

SEQ ID NO: 27941 - DNA, 26 bp, Homo sapiens
catcttctccagtccagccacgatct

SEQ ID NO: 27942 - DNA, 26 bp, Homo sapiens
atcttctccagtccagccacgatctc

SEQ ID NO: 27943 - DNA, 26 bp, Homo sapiens
tcttctccagtccagccacgatctcg

SEQ ID NO: 27944 - DNA, 26 bp, Homo sapiens
cttctccagtccagccacgatctcgc

SEQ ID NO: 27945 - DNA, 26 bp, Homo sapiens
ttctccagtccagccacgatctcgct

SEQ ID NO: 27946 - DNA, 26 bp, Homo sapiens
tctccagtccagccacgatctcgctt

SEQ ID NO: 27947 - DNA, 26 bp, Homo sapiens
ctccagtccagccacgatctcgcttc

SEQ ID NO: 27948 - DNA, 26 bp, Homo sapiens
tccagtccagccacgatctcgcttcc

SEQ ID NO: 27949 - DNA, 26 bp, Homo sapiens
ccagtccagccacgatctcgcttcct

SEQ ID NO: 27950 - DNA, 26 bp, Homo sapiens
cagtccagccacgatctcgcttcctc

SEQ ID NO: 27951 - DNA, 26 bp, Homo sapiens
agtccagccacgatctcgcttcctcg

SEQ ID NO: 27952 - DNA, 26 bp, Homo sapiens
gtccagccacgatctcgcttcctcgc

SEQ ID NO: 27953 - DNA, 26 bp, Homo sapiens
tccagccacgatctcgcttcctcgct

SEQ ID NO: 27954 - DNA, 26 bp, Homo sapiens
ccagccacgatctcgcttcctcgctg

SEQ ID NO: 27955 - DNA, 26 bp, Homo sapiens
cagccacgatctcgcttcctcgctga

SEQ ID NO: 27956 - DNA, 26 bp, Homo sapiens
agccacgatctcgcttcctcgctgac

SEQ ID NO: 27957 - DNA, 26 bp, Homo sapiens
gccacgatctcgcttcctcgctgaca

SEQ ID NO: 27958 - DNA, 26 bp, Homo sapiens
ccacgatctcgcttcctcgctgacac

SEQ ID NO: 27959 - DNA, 26 bp, Homo sapiens
cacgatctcgcttcctcgctgacact

SEQ ID NO: 27960 - DNA, 26 bp, Homo sapiens
acgatctcgcttcctcgctgacactg

SEQ ID NO: 27961 - DNA, 26 bp, Homo sapiens
cgatctcgcttcctcgctgacactgc

SEQ ID NO: 27962 - DNA, 26 bp, Homo sapiens
gatctcgcttcctcgctgacactgcc

SEQ ID NO: 27963 - DNA, 26 bp, Homo sapiens
atctcgcttcctcgctgacactgccc

SEQ ID NO: 27964 - DNA, 26 bp, Homo sapiens
tctcgcttcctcgctgacactgcccc

SEQ ID NO: 27965 - DNA, 26 bp, Homo sapiens
ctcgcttcctcgctgacactgcccct

SEQ ID NO: 27966 - DNA, 26 bp, Homo sapiens
tcgcttcctcgctgacactgcccctc

SEQ ID NO: 27967 - DNA, 26 bp, Homo sapiens
cgcttcctcgctgacactgcccctca

SEQ ID NO: 27968 - DNA, 26 bp, Homo sapiens
gcttcctcgctgacactgcccctcag

SEQ ID NO: 27969 - DNA, 26 bp, Homo sapiens
cttcctcgctgacactgcccctcagc

SEQ ID NO: 27970 - DNA, 26 bp, Homo sapiens
ttcctcgctgacactgcccctcagct

SEQ ID NO: 27971 - DNA, 26 bp, Homo sapiens
tcctcgctgacactgcccctcagcta

SEQ ID NO: 27972 - DNA, 26 bp, Homo sapiens
cctcgctgacactgcccctcagctac

SEQ ID NO: 27973 - DNA, 26 bp, Homo sapiens
ctcgctgacactgcccctcagctaca

SEQ ID NO: 27974 - DNA, 26 bp, Homo sapiens
tcgctgacactgcccctcagctacac

SEQ ID NO: 27975 - DNA, 26 bp, Homo sapiens
cgctgacactgcccctcagctacaca

SEQ ID NO: 27976 - DNA, 26 bp, Homo sapiens
gctgacactgcccctcagctacacac

SEQ ID NO: 27977 - DNA, 26 bp, Homo sapiens
ctgacactgcccctcagctacacacg

SEQ ID NO: 27978 - DNA, 26 bp, Homo sapiens
tgacactgcccctcagctacacacgt

SEQ ID NO: 27979 - DNA, 26 bp, Homo sapiens
gacactgcccctcagctacacacgtg

SEQ ID NO: 27980 - DNA, 26 bp, Homo sapiens
acactgcccctcagctacacacgtgt

SEQ ID NO: 27981 - DNA, 26 bp, Homo sapiens
cactgcccctcagctacacacgtgta

SEQ ID NO: 27982 - DNA, 26 bp, Homo sapiens
actgcccctcagctacacacgtgtag

SEQ ID NO: 27983 - DNA, 26 bp, Homo sapiens
ctgcccctcagctacacacgtgtagc

SEQ ID NO: 27984 - DNA, 26 bp, Homo sapiens
tgcccctcagctacacacgtgtagcc

SEQ ID NO: 27985 - DNA, 26 bp, Homo sapiens
gcccctcagctacacacgtgtagccc

SEQ ID NO: 27986 - DNA, 26 bp, Homo sapiens
cccctcagctacacacgtgtagccct

SEQ ID NO: 27987 - DNA, 26 bp, Homo sapiens
ccctcagctacacacgtgtagccctg

SEQ ID NO: 27988 - DNA, 26 bp, Homo sapiens
cctcagctacacacgtgtagccctgg

SEQ ID NO: 27989 - DNA, 26 bp, Homo sapiens
ctcagctacacacgtgtagccctggg

SEQ ID NO: 27990 - DNA, 26 bp, Homo sapiens
tcagctacacacgtgtagccctgggg

SEQ ID NO: 27991 - DNA, 26 bp, Homo sapiens
cagctacacacgtgtagccctggggg

SEQ ID NO: 27992 - DNA, 26 bp, Homo sapiens
agctacacacgtgtagccctgggggc

SEQ ID NO: 27993 - DNA, 26 bp, Homo sapiens
gctacacacgtgtagccctgggggca

SEQ ID NO: 27994 - DNA, 26 bp, Homo sapiens
ctacacacgtgtagccctgggggcag

SEQ ID NO: 27995 - DNA, 26 bp, Homo sapiens
tacacacgtgtagccctgggggcagc

SEQ ID NO: 27996 - DNA, 26 bp, Homo sapiens
acacacgtgtagccctgggggcagca

SEQ ID NO: 27997 - DNA, 26 bp, Homo sapiens
cacacgtgtagccctgggggcagcag

SEQ ID NO: 27998 - DNA, 26 bp, Homo sapiens
acacgtgtagccctgggggcagcagt

SEQ ID NO: 27999 - DNA, 26 bp, Homo sapiens
cacgtgtagccctgggggcagcagtg

SEQ ID NO: 28000 - DNA, 26 bp, Homo sapiens
acgtgtagccctgggggcagcagtgc

SEQ ID NO: 28001 - DNA, 26 bp, Homo sapiens
cgtgtagccctgggggcagcagtgct

SEQ ID NO: 28002 - DNA, 26 bp, Homo sapiens
gtgtagccctgggggcagcagtgctg

SEQ ID NO: 28003 - DNA, 26 bp, Homo sapiens
tgtagccctgggggcagcagtgctgg

SEQ ID NO: 28004 - DNA, 26 bp, Homo sapiens
gtagccctgggggcagcagtgctggt

SEQ ID NO: 28005 - DNA, 26 bp, Homo sapiens
tagccctgggggcagcagtgctggtg

SEQ ID NO: 28006 - DNA, 26 bp, Homo sapiens
agccctgggggcagcagtgctggtgg

SEQ ID NO: 28007 - DNA, 26 bp, Homo sapiens
gccctgggggcagcagtgctggtggt

SEQ ID NO: 28008 - DNA, 26 bp, Homo sapiens
ccctgggggcagcagtgctggtggtc

SEQ ID NO: 28009 - DNA, 26 bp, Homo sapiens
cctgggggcagcagtgctggtggtcc

SEQ ID NO: 28010 - DNA, 26 bp, Homo sapiens
ctgggggcagcagtgctggtggtccg

SEQ ID NO: 28011 - DNA, 26 bp, Homo sapiens
tgggggcagcagtgctggtggtccga

SEQ ID NO: 28012 - DNA, 26 bp, Homo sapiens
gggggcagcagtgctggtggtccgag

SEQ ID NO: 28013 - DNA, 26 bp, Homo sapiens
ggggcagcagtgctggtggtccgagc

SEQ ID NO: 28014 - DNA, 26 bp, Homo sapiens
gggcagcagtgctggtggtccgagca

SEQ ID NO: 28015 - DNA, 26 bp, Homo sapiens
ggcagcagtgctggtggtccgagcag

SEQ ID NO: 28016 - DNA, 26 bp, Homo sapiens
gcagcagtgctggtggtccgagcagc

SEQ ID NO: 28017 - DNA, 26 bp, Homo sapiens
cagcagtgctggtggtccgagcagca

SEQ ID NO: 28018 - DNA, 26 bp, Homo sapiens
agcagtgctggtggtccgagcagcag

SEQ ID NO: 28019 - DNA, 26 bp, Homo sapiens
gcagtgctggtggtccgagcagcaga

SEQ ID NO: 28020 - DNA, 26 bp, Homo sapiens
cagtgctggtggtccgagcagcagac

SEQ ID NO: 28021 - DNA, 26 bp, Homo sapiens
agtgctggtggtccgagcagcagaca

SEQ ID NO: 28022 - DNA, 26 bp, Homo sapiens
gtgctggtggtccgagcagcagacag

SEQ ID NO: 28023 - DNA, 26 bp, Homo sapiens
tgctggtggtccgagcagcagacagc

SEQ ID NO: 28024 - DNA, 26 bp, Homo sapiens
gctggtggtccgagcagcagacagcc

SEQ ID NO: 28025 - DNA, 26 bp, Homo sapiens
ctggtggtccgagcagcagacagcct

SEQ ID NO: 28026 - DNA, 26 bp, Homo sapiens
tggtggtccgagcagcagacagcctc

SEQ ID NO: 28027 - DNA, 26 bp, Homo sapiens
ggtggtccgagcagcagacagcctct

SEQ ID NO: 28028 - DNA, 26 bp, Homo sapiens
gtggtccgagcagcagacagcctctg

SEQ ID NO: 28029 - DNA, 26 bp, Homo sapiens
tggtccgagcagcagacagcctctgg

SEQ ID NO: 28030 - DNA, 26 bp, Homo sapiens
ggtccgagcagcagacagcctctggg

SEQ ID NO: 28031 - DNA, 26 bp, Homo sapiens
gtccgagcagcagacagcctctggga

SEQ ID NO: 28032 - DNA, 26 bp, Homo sapiens
tccgagcagcagacagcctctgggat

SEQ ID NO: 28033 - DNA, 26 bp, Homo sapiens
ccgagcagcagacagcctctgggatt

SEQ ID NO: 28034 - DNA, 26 bp, Homo sapiens
cgagcagcagacagcctctgggattg

SEQ ID NO: 28035 - DNA, 26 bp, Homo sapiens
gagcagcagacagcctctgggattgg

SEQ ID NO: 28036 - DNA, 26 bp, Homo sapiens
agcagcagacagcctctgggattgga

SEQ ID NO: 28037 - DNA, 26 bp, Homo sapiens
gcagcagacagcctctgggattggac

SEQ ID NO: 28038 - DNA, 26 bp, Homo sapiens
cagcagacagcctctgggattggaca

SEQ ID NO: 28039 - DNA, 26 bp, Homo sapiens
agcagacagcctctgggattggacag

SEQ ID NO: 28040 - DNA, 26 bp, Homo sapiens
gcagacagcctctgggattggacagc

SEQ ID NO: 28041 - DNA, 26 bp, Homo sapiens
cagacagcctctgggattggacagca

SEQ ID NO: 28042 - DNA, 26 bp, Homo sapiens
agacagcctctgggattggacagcag

SEQ ID NO: 28043 - DNA, 26 bp, Homo sapiens
gacagcctctgggattggacagcagc

SEQ ID NO: 28044 - DNA, 26 bp, Homo sapiens
acagcctctgggattggacagcagcc

SEQ ID NO: 28045 - DNA, 26 bp, Homo sapiens
cagcctctgggattggacagcagccc

SEQ ID NO: 28046 - DNA, 26 bp, Homo sapiens
agcctctgggattggacagcagcccc

SEQ ID NO: 28047 - DNA, 26 bp, Homo sapiens
gcctctgggattggacagcagcccca

SEQ ID NO: 28048 - DNA, 26 bp, Homo sapiens
cctctgggattggacagcagccccac

SEQ ID NO: 28049 - DNA, 26 bp, Homo sapiens
ctctgggattggacagcagccccact

SEQ ID NO: 28050 - DNA, 26 bp, Homo sapiens
tctgggattggacagcagccccactc

SEQ ID NO: 28051 - DNA, 26 bp, Homo sapiens
ctgggattggacagcagccccactcc

SEQ ID NO: 28052 - DNA, 26 bp, Homo sapiens
tgggattggacagcagccccactccc

SEQ ID NO: 28053 - DNA, 26 bp, Homo sapiens
gggattggacagcagccccactcccc

SEQ ID NO: 28054 - DNA, 26 bp, Homo sapiens
ggattggacagcagccccactcccca

SEQ ID NO: 28055 - DNA, 26 bp, Homo sapiens
gattggacagcagccccactccccag

SEQ ID NO: 28056 - DNA, 26 bp, Homo sapiens
attggacagcagccccactccccaga

SEQ ID NO: 28057 - DNA, 26 bp, Homo sapiens
ttggacagcagccccactccccagac

SEQ ID NO: 28058 - DNA, 26 bp, Homo sapiens
tggacagcagccccactccccagacg

SEQ ID NO: 28059 - DNA, 26 bp, Homo sapiens
ggacagcagccccactccccagacgt

SEQ ID NO: 28060 - DNA, 26 bp, Homo sapiens
gacagcagccccactccccagacgtg

SEQ ID NO: 28061 - DNA, 26 bp, Homo sapiens
acagcagccccactccccagacgtga

SEQ ID NO: 28062 - DNA, 26 bp, Homo sapiens
cagcagccccactccccagacgtgag

SEQ ID NO: 28063 - DNA, 26 bp, Homo sapiens
agcagccccactccccagacgtgagt

SEQ ID NO: 28064 - DNA, 26 bp, Homo sapiens
gcagccccactccccagacgtgagtt

SEQ ID NO: 28065 - DNA, 26 bp, Homo sapiens
cagccccactccccagacgtgagttg

SEQ ID NO: 28066 - DNA, 26 bp, Homo sapiens
agccccactccccagacgtgagttgg

SEQ ID NO: 28067 - DNA, 26 bp, Homo sapiens
gccccactccccagacgtgagttggc

SEQ ID NO: 28068 - DNA, 26 bp, Homo sapiens
ccccactccccagacgtgagttggca

SEQ ID NO: 28069 - DNA, 26 bp, Homo sapiens
cccactccccagacgtgagttggcag

SEQ ID NO: 28070 - DNA, 26 bp, Homo sapiens
ccactccccagacgtgagttggcagc

SEQ ID NO: 28071 - DNA, 26 bp, Homo sapiens
cactccccagacgtgagttggcagca

SEQ ID NO: 28072 - DNA, 26 bp, Homo sapiens
actccccagacgtgagttggcagcag

SEQ ID NO: 28073 - DNA, 26 bp, Homo sapiens
ctccccagacgtgagttggcagcagg

SEQ ID NO: 28074 - DNA, 26 bp, Homo sapiens
tccccagacgtgagttggcagcaggt

SEQ ID NO: 28075 - DNA, 26 bp, Homo sapiens
ccccagacgtgagttggcagcaggta

SEQ ID NO: 28076 - DNA, 26 bp, Homo sapiens
cccagacgtgagttggcagcaggtat

SEQ ID NO: 28077 - DNA, 26 bp, Homo sapiens
ccagacgtgagttggcagcaggtatc

SEQ ID NO: 28078 - DNA, 26 bp, Homo sapiens
cagacgtgagttggcagcaggtatcg

SEQ ID NO: 28079 - DNA, 26 bp, Homo sapiens
agacgtgagttggcagcaggtatcgg

SEQ ID NO: 28080 - DNA, 26 bp, Homo sapiens
gacgtgagttggcagcaggtatcgga

SEQ ID NO: 28081 - DNA, 26 bp, Homo sapiens
acgtgagttggcagcaggtatcggag

SEQ ID NO: 28082 - DNA, 26 bp, Homo sapiens
cgtgagttggcagcaggtatcggagg

SEQ ID NO: 28083 - DNA, 26 bp, Homo sapiens
gtgagttggcagcaggtatcggagga

SEQ ID NO: 28084 - DNA, 26 bp, Homo sapiens
tgagttggcagcaggtatcggaggag

SEQ ID NO: 28085 - DNA, 26 bp, Homo sapiens
gagttggcagcaggtatcggaggagg

SEQ ID NO: 28086 - DNA, 26 bp, Homo sapiens
agttggcagcaggtatcggaggaggg

SEQ ID NO: 28087 - DNA, 26 bp, Homo sapiens
gttggcagcaggtatcggaggaggga

SEQ ID NO: 28088 - DNA, 26 bp, Homo sapiens
ttggcagcaggtatcggaggagggac

SEQ ID NO: 28089 - DNA, 26 bp, Homo sapiens
tggcagcaggtatcggaggagggaca

SEQ ID NO: 28090 - DNA, 26 bp, Homo sapiens
ggcagcaggtatcggaggagggacag

SEQ ID NO: 28091 - DNA, 26 bp, Homo sapiens
gcagcaggtatcggaggagggacagc

SEQ ID NO: 28092 - DNA, 26 bp, Homo sapiens
cagcaggtatcggaggagggacagct

SEQ ID NO: 28093 - DNA, 26 bp, Homo sapiens
agcaggtatcggaggagggacagctg

SEQ ID NO: 28094 - DNA, 26 bp, Homo sapiens
gcaggtatcggaggagggacagctgc

SEQ ID NO: 28095 - DNA, 26 bp, Homo sapiens
caggtatcggaggagggacagctgct

SEQ ID NO: 28096 - DNA, 26 bp, Homo sapiens
aggtatcggaggagggacagctgctg

SEQ ID NO: 28097 - DNA, 26 bp, Homo sapiens
ggtatcggaggagggacagctgctga

SEQ ID NO: 28098 - DNA, 26 bp, Homo sapiens
gtatcggaggagggacagctgctgac

SEQ ID NO: 28099 - DNA, 26 bp, Homo sapiens
tatcggaggagggacagctgctgaca

SEQ ID NO: 28100 - DNA, 26 bp, Homo sapiens
atcggaggagggacagctgctgacat

SEQ ID NO: 28101 - DNA, 26 bp, Homo sapiens
tcggaggagggacagctgctgacatt

SEQ ID NO: 28102 - DNA, 26 bp, Homo sapiens
cggaggagggacagctgctgacatta

SEQ ID NO: 28103 - DNA, 26 bp, Homo sapiens
ggaggagggacagctgctgacattat

SEQ ID NO: 28104 - DNA, 26 bp, Homo sapiens
gaggagggacagctgctgacattatc

SEQ ID NO: 28105 - DNA, 26 bp, Homo sapiens
aggagggacagctgctgacattatca

SEQ ID NO: 28106 - DNA, 26 bp, Homo sapiens
ggagggacagctgctgacattatcac

SEQ ID NO: 28107 - DNA, 26 bp, Homo sapiens
gagggacagctgctgacattatcaca

SEQ ID NO: 28108 - DNA, 26 bp, Homo sapiens
agggacagctgctgacattatcacag

SEQ ID NO: 28109 - DNA, 26 bp, Homo sapiens
gggacagctgctgacattatcacagg

SEQ ID NO: 28110 - DNA, 26 bp, Homo sapiens
ggacagctgctgacattatcacaggg

SEQ ID NO: 28111 - DNA, 26 bp, Homo sapiens
gacagctgctgacattatcacagggg

SEQ ID NO: 28112 - DNA, 26 bp, Homo sapiens
acagctgctgacattatcacagggga

SEQ ID NO: 28113 - DNA, 26 bp, Homo sapiens
cagctgctgacattatcacaggggac

SEQ ID NO: 28114 - DNA, 26 bp, Homo sapiens
agctgctgacattatcacaggggaca

SEQ ID NO: 28115 - DNA, 26 bp, Homo sapiens
gctgctgacattatcacaggggacat

SEQ ID NO: 28116 - DNA, 26 bp, Homo sapiens
ctgctgacattatcacaggggacatc

SEQ ID NO: 28117 - DNA, 26 bp, Homo sapiens
tgctgacattatcacaggggacatct

SEQ ID NO: 28118 - DNA, 26 bp, Homo sapiens
gctgacattatcacaggggacatctc

SEQ ID NO: 28119 - DNA, 26 bp, Homo sapiens
ctgacattatcacaggggacatctct

SEQ ID NO: 28120 - DNA, 26 bp, Homo sapiens
tgacattatcacaggggacatctctc

SEQ ID NO: 28121 - DNA, 26 bp, Homo sapiens
gacattatcacaggggacatctctct

SEQ ID NO: 28122 - DNA, 26 bp, Homo sapiens
acattatcacaggggacatctctctt

SEQ ID NO: 28123 - DNA, 26 bp, Homo sapiens
cattatcacaggggacatctctcttc

SEQ ID NO: 28124 - DNA, 26 bp, Homo sapiens
attatcacaggggacatctctcttca

SEQ ID NO: 28125 - DNA, 26 bp, Homo sapiens
ttatcacaggggacatctctcttcaa

SEQ ID NO: 28126 - DNA, 26 bp, Homo sapiens
tatcacaggggacatctctcttcaag

SEQ ID NO: 28127 - DNA, 26 bp, Homo sapiens
atcacaggggacatctctcttcaagg

SEQ ID NO: 28128 - DNA, 26 bp, Homo sapiens
tcacaggggacatctctcttcaaggc

SEQ ID NO: 28129 - DNA, 26 bp, Homo sapiens
cacaggggacatctctcttcaaggct

SEQ ID NO: 28130 - DNA, 26 bp, Homo sapiens
acaggggacatctctcttcaaggctt

SEQ ID NO: 28131 - DNA, 26 bp, Homo sapiens
caggggacatctctcttcaaggcttg

SEQ ID NO: 28132 - DNA, 26 bp, Homo sapiens
aggggacatctctcttcaaggcttgt

SEQ ID NO: 28133 - DNA, 26 bp, Homo sapiens
ggggacatctctcttcaaggcttgtg

SEQ ID NO: 28134 - DNA, 26 bp, Homo sapiens
gggacatctctcttcaaggcttgtgg

SEQ ID NO: 28135 - DNA, 26 bp, Homo sapiens
ggacatctctcttcaaggcttgtggg

SEQ ID NO: 28136 - DNA, 26 bp, Homo sapiens
gacatctctcttcaaggcttgtgggt

SEQ ID NO: 28137 - DNA, 26 bp, Homo sapiens
acatctctcttcaaggcttgtgggtc

SEQ ID NO: 28138 - DNA, 26 bp, Homo sapiens
catctctcttcaaggcttgtgggtct

SEQ ID NO: 28139 - DNA, 26 bp, Homo sapiens
atctctcttcaaggcttgtgggtctg

SEQ ID NO: 28140 - DNA, 26 bp, Homo sapiens
tctctcttcaaggcttgtgggtctgg

SEQ ID NO: 28141 - DNA, 26 bp, Homo sapiens
ctctcttcaaggcttgtgggtctggc

SEQ ID NO: 28142 - DNA, 26 bp, Homo sapiens
tctcttcaaggcttgtgggtctggca

SEQ ID NO: 28143 - DNA, 26 bp, Homo sapiens
ctcttcaaggcttgtgggtctggcag

SEQ ID NO: 28144 - DNA, 26 bp, Homo sapiens
tcttcaaggcttgtgggtctggcagg

SEQ ID NO: 28145 - DNA, 26 bp, Homo sapiens
cttcaaggcttgtgggtctggcaggc

SEQ ID NO: 28146 - DNA, 26 bp, Homo sapiens
ttcaaggcttgtgggtctggcaggct

SEQ ID NO: 28147 - DNA, 26 bp, Homo sapiens
tcaaggcttgtgggtctggcaggctg

SEQ ID NO: 28148 - DNA, 26 bp, Homo sapiens
caaggcttgtgggtctggcaggctga

SEQ ID NO: 28149 - DNA, 26 bp, Homo sapiens
aaggcttgtgggtctggcaggctgag

SEQ ID NO: 28150 - DNA, 26 bp, Homo sapiens
aggcttgtgggtctggcaggctgagg

SEQ ID NO: 28151 - DNA, 26 bp, Homo sapiens
ggcttgtgggtctggcaggctgaggt

SEQ ID NO: 28152 - DNA, 26 bp, Homo sapiens
gcttgtgggtctggcaggctgaggtg

SEQ ID NO: 28153 - DNA, 26 bp, Homo sapiens
cttgtgggtctggcaggctgaggtga

SEQ ID NO: 28154 - DNA, 26 bp, Homo sapiens
ttgtgggtctggcaggctgaggtgag

SEQ ID NO: 28155 - DNA, 26 bp, Homo sapiens
tgtgggtctggcaggctgaggtgagc

SEQ ID NO: 28156 - DNA, 26 bp, Homo sapiens
gtgggtctggcaggctgaggtgagct

SEQ ID NO: 28157 - DNA, 26 bp, Homo sapiens
tgggtctggcaggctgaggtgagctg

SEQ ID NO: 28158 - DNA, 26 bp, Homo sapiens
gggtctggcaggctgaggtgagctgg

SEQ ID NO: 28159 - DNA, 26 bp, Homo sapiens
ggtctggcaggctgaggtgagctggg

SEQ ID NO: 28160 - DNA, 26 bp, Homo sapiens
gtctggcaggctgaggtgagctgggg

SEQ ID NO: 28161 - DNA, 26 bp, Homo sapiens
tctggcaggctgaggtgagctggggc

SEQ ID NO: 28162 - DNA, 26 bp, Homo sapiens
ctggcaggctgaggtgagctggggcc

SEQ ID NO: 28163 - DNA, 26 bp, Homo sapiens
tggcaggctgaggtgagctggggcct

SEQ ID NO: 28164 - DNA, 26 bp, Homo sapiens
ggcaggctgaggtgagctggggcctt

SEQ ID NO: 28165 - DNA, 26 bp, Homo sapiens
gcaggctgaggtgagctggggccttc

SEQ ID NO: 28166 - DNA, 26 bp, Homo sapiens
caggctgaggtgagctggggccttct

SEQ ID NO: 28167 - DNA, 26 bp, Homo sapiens
aggctgaggtgagctggggccttctc

SEQ ID NO: 28168 - DNA, 26 bp, Homo sapiens
ggctgaggtgagctggggccttctcc

SEQ ID NO: 28169 - DNA, 26 bp, Homo sapiens
gctgaggtgagctggggccttctcca

SEQ ID NO: 28170 - DNA, 26 bp, Homo sapiens
ctgaggtgagctggggccttctccat

SEQ ID NO: 28171 - DNA, 26 bp, Homo sapiens
tgaggtgagctggggccttctccatc

SEQ ID NO: 28172 - DNA, 26 bp, Homo sapiens
gaggtgagctggggccttctccatcc

SEQ ID NO: 28173 - DNA, 26 bp, Homo sapiens
aggtgagctggggccttctccatcca

SEQ ID NO: 28174 - DNA, 26 bp, Homo sapiens
ggtgagctggggccttctccatccag

SEQ ID NO: 28175 - DNA, 26 bp, Homo sapiens
gtgagctggggccttctccatccagg

SEQ ID NO: 28176 - DNA, 26 bp, Homo sapiens
tgagctggggccttctccatccaggg

SEQ ID NO: 28177 - DNA, 26 bp, Homo sapiens
gagctggggccttctccatccagggc

SEQ ID NO: 28178 - DNA, 26 bp, Homo sapiens
agctggggccttctccatccagggca

SEQ ID NO: 28179 - DNA, 26 bp, Homo sapiens
gctggggccttctccatccagggcac

SEQ ID NO: 28180 - DNA, 26 bp, Homo sapiens
ctggggccttctccatccagggcacc

SEQ ID NO: 28181 - DNA, 26 bp, Homo sapiens
tggggccttctccatccagggcacct

SEQ ID NO: 28182 - DNA, 26 bp, Homo sapiens
ggggccttctccatccagggcacctg

SEQ ID NO: 28183 - DNA, 26 bp, Homo sapiens
gggccttctccatccagggcacctgg

SEQ ID NO: 28184 - DNA, 26 bp, Homo sapiens
ggccttctccatccagggcacctggt

SEQ ID NO: 28185 - DNA, 26 bp, Homo sapiens
gccttctccatccagggcacctggtg

SEQ ID NO: 28186 - DNA, 26 bp, Homo sapiens
ccttctccatccagggcacctggtgg

SEQ ID NO: 28187 - DNA, 26 bp, Homo sapiens
cttctccatccagggcacctggtggg

SEQ ID NO: 28188 - DNA, 26 bp, Homo sapiens
ttctccatccagggcacctggtgggg

SEQ ID NO: 28189 - DNA, 26 bp, Homo sapiens
tctccatccagggcacctggtggggc

SEQ ID NO: 28190 - DNA, 26 bp, Homo sapiens
ctccatccagggcacctggtggggcc

SEQ ID NO: 28191 - DNA, 26 bp, Homo sapiens
tccatccagggcacctggtggggccc

SEQ ID NO: 28192 - DNA, 26 bp, Homo sapiens
ccatccagggcacctggtggggcccc

SEQ ID NO: 28193 - DNA, 26 bp, Homo sapiens
catccagggcacctggtggggcccct

SEQ ID NO: 28194 - DNA, 26 bp, Homo sapiens
atccagggcacctggtggggcccctg

SEQ ID NO: 28195 - DNA, 26 bp, Homo sapiens
tccagggcacctggtggggcccctgt

SEQ ID NO: 28196 - DNA, 26 bp, Homo sapiens
ccagggcacctggtggggcccctgtt

SEQ ID NO: 28197 - DNA, 26 bp, Homo sapiens
cagggcacctggtggggcccctgttc

SEQ ID NO: 28198 - DNA, 26 bp, Homo sapiens
agggcacctggtggggcccctgttca

SEQ ID NO: 28199 - DNA, 26 bp, Homo sapiens
gggcacctggtggggcccctgttcac

SEQ ID NO: 28200 - DNA, 26 bp, Homo sapiens
ggcacctggtggggcccctgttcaca

SEQ ID NO: 28201 - DNA, 26 bp, Homo sapiens
gcacctggtggggcccctgttcacag

SEQ ID NO: 28202 - DNA, 26 bp, Homo sapiens
cacctggtggggcccctgttcacagg

SEQ ID NO: 28203 - DNA, 26 bp, Homo sapiens
acctggtggggcccctgttcacaggt

SEQ ID NO: 28204 - DNA, 26 bp, Homo sapiens
cctggtggggcccctgttcacaggta

SEQ ID NO: 28205 - DNA, 26 bp, Homo sapiens
ctggtggggcccctgttcacaggtac

SEQ ID NO: 28206 - DNA, 26 bp, Homo sapiens
tggtggggcccctgttcacaggtacc

SEQ ID NO: 28207 - DNA, 26 bp, Homo sapiens
ggtggggcccctgttcacaggtaccc

SEQ ID NO: 28208 - DNA, 26 bp, Homo sapiens
gtggggcccctgttcacaggtaccct

SEQ ID NO: 28209 - DNA, 26 bp, Homo sapiens
tggggcccctgttcacaggtaccctt

SEQ ID NO: 28210 - DNA, 26 bp, Homo sapiens
ggggcccctgttcacaggtacccttc

SEQ ID NO: 28211 - DNA, 26 bp, Homo sapiens
gggcccctgttcacaggtacccttct

SEQ ID NO: 28212 - DNA, 26 bp, Homo sapiens
ggcccctgttcacaggtacccttctg

SEQ ID NO: 28213 - DNA, 26 bp, Homo sapiens
gcccctgttcacaggtacccttctgc

SEQ ID NO: 28214 - DNA, 26 bp, Homo sapiens
cccctgttcacaggtacccttctgcg

SEQ ID NO: 28215 - DNA, 26 bp, Homo sapiens
ccctgttcacaggtacccttctgcgt

SEQ ID NO: 28216 - DNA, 26 bp, Homo sapiens
cctgttcacaggtacccttctgcgtg

SEQ ID NO: 28217 - DNA, 26 bp, Homo sapiens
ctgttcacaggtacccttctgcgtgt

SEQ ID NO: 28218 - DNA, 26 bp, Homo sapiens
tgttcacaggtacccttctgcgtgtc

SEQ ID NO: 28219 - DNA, 26 bp, Homo sapiens
gttcacaggtacccttctgcgtgtca

SEQ ID NO: 28220 - DNA, 26 bp, Homo sapiens
ttcacaggtacccttctgcgtgtcac

SEQ ID NO: 28221 - DNA, 26 bp, Homo sapiens
tcacaggtacccttctgcgtgtcaca

SEQ ID NO: 28222 - DNA, 26 bp, Homo sapiens
cacaggtacccttctgcgtgtcacac

SEQ ID NO: 28223 - DNA, 26 bp, Homo sapiens
acaggtacccttctgcgtgtcacacg

SEQ ID NO: 28224 - DNA, 26 bp, Homo sapiens
caggtacccttctgcgtgtcacacgt

SEQ ID NO: 28225 - DNA, 26 bp, Homo sapiens
aggtacccttctgcgtgtcacacgta

SEQ ID NO: 28226 - DNA, 26 bp, Homo sapiens
ggtacccttctgcgtgtcacacgtaa

SEQ ID NO: 28227 - DNA, 26 bp, Homo sapiens
gtacccttctgcgtgtcacacgtaaa

SEQ ID NO: 28228 - DNA, 26 bp, Homo sapiens
tacccttctgcgtgtcacacgtaaac

SEQ ID NO: 28229 - DNA, 26 bp, Homo sapiens
acccttctgcgtgtcacacgtaaacc

SEQ ID NO: 28230 - DNA, 26 bp, Homo sapiens
cccttctgcgtgtcacacgtaaaccc

SEQ ID NO: 28231 - DNA, 26 bp, Homo sapiens
ccttctgcgtgtcacacgtaaacccc

SEQ ID NO: 28232 - DNA, 26 bp, Homo sapiens
cttctgcgtgtcacacgtaaaccccg

SEQ ID NO: 28233 - DNA, 26 bp, Homo sapiens
ttctgcgtgtcacacgtaaaccccgc

SEQ ID NO: 28234 - DNA, 26 bp, Homo sapiens
tctgcgtgtcacacgtaaaccccgcg

SEQ ID NO: 28235 - DNA, 26 bp, Homo sapiens
ctgcgtgtcacacgtaaaccccgcgg

SEQ ID NO: 28236 - DNA, 26 bp, Homo sapiens
tgcgtgtcacacgtaaaccccgcggg

SEQ ID NO: 28237 - DNA, 26 bp, Homo sapiens
gcgtgtcacacgtaaaccccgcggga

SEQ ID NO: 28238 - DNA, 26 bp, Homo sapiens
cgtgtcacacgtaaaccccgcgggac

SEQ ID NO: 28239 - DNA, 26 bp, Homo sapiens
gtgtcacacgtaaaccccgcgggaca

SEQ ID NO: 28240 - DNA, 26 bp, Homo sapiens
tgtcacacgtaaaccccgcgggacag

SEQ ID NO: 28241 - DNA, 26 bp, Homo sapiens
gtcacacgtaaaccccgcgggacagc

SEQ ID NO: 28242 - DNA, 26 bp, Homo sapiens
tcacacgtaaaccccgcgggacagca

SEQ ID NO: 28243 - DNA, 26 bp, Homo sapiens
cacacgtaaaccccgcgggacagcag

SEQ ID NO: 28244 - DNA, 26 bp, Homo sapiens
acacgtaaaccccgcgggacagcagt

SEQ ID NO: 28245 - DNA, 26 bp, Homo sapiens
cacgtaaaccccgcgggacagcagtg

SEQ ID NO: 28246 - DNA, 26 bp, Homo sapiens
acgtaaaccccgcgggacagcagtgt

SEQ ID NO: 28247 - DNA, 26 bp, Homo sapiens
cgtaaaccccgcgggacagcagtgta

SEQ ID NO: 28248 - DNA, 26 bp, Homo sapiens
gtaaaccccgcgggacagcagtgtat

SEQ ID NO: 28249 - DNA, 26 bp, Homo sapiens
taaaccccgcgggacagcagtgtatg

SEQ ID NO: 28250 - DNA, 26 bp, Homo sapiens
aaaccccgcgggacagcagtgtatgt

SEQ ID NO: 28251 - DNA, 26 bp, Homo sapiens
aaccccgcgggacagcagtgtatgtg

SEQ ID NO: 28252 - DNA, 26 bp, Homo sapiens
accccgcgggacagcagtgtatgtgg

SEQ ID NO: 28253 - DNA, 26 bp, Homo sapiens
ccccgcgggacagcagtgtatgtggt

SEQ ID NO: 28254 - DNA, 26 bp, Homo sapiens
cccgcgggacagcagtgtatgtggtc

SEQ ID NO: 28255 - DNA, 26 bp, Homo sapiens
ccgcgggacagcagtgtatgtggtcc

SEQ ID NO: 28256 - DNA, 26 bp, Homo sapiens
cgcgggacagcagtgtatgtggtcct

SEQ ID NO: 28257 - DNA, 26 bp, Homo sapiens
gcgggacagcagtgtatgtggtcctc

SEQ ID NO: 28258 - DNA, 26 bp, Homo sapiens
cgggacagcagtgtatgtggtcctca

SEQ ID NO: 28259 - DNA, 26 bp, Homo sapiens
gggacagcagtgtatgtggtcctcac

SEQ ID NO: 28260 - DNA, 26 bp, Homo sapiens
ggacagcagtgtatgtggtcctcaca

SEQ ID NO: 28261 - DNA, 26 bp, Homo sapiens
gacagcagtgtatgtggtcctcacag

SEQ ID NO: 28262 - DNA, 26 bp, Homo sapiens
acagcagtgtatgtggtcctcacagc

SEQ ID NO: 28263 - DNA, 26 bp, Homo sapiens
cagcagtgtatgtggtcctcacagca

SEQ ID NO: 28264 - DNA, 26 bp, Homo sapiens
agcagtgtatgtggtcctcacagcac

SEQ ID NO: 28265 - DNA, 26 bp, Homo sapiens
gcagtgtatgtggtcctcacagcaca

SEQ ID NO: 28266 - DNA, 26 bp, Homo sapiens
cagtgtatgtggtcctcacagcacac

SEQ ID NO: 28267 - DNA, 26 bp, Homo sapiens
agtgtatgtggtcctcacagcacaca

SEQ ID NO: 28268 - DNA, 26 bp, Homo sapiens
gtgtatgtggtcctcacagcacacag

SEQ ID NO: 28269 - DNA, 26 bp, Homo sapiens
tgtatgtggtcctcacagcacacagc

SEQ ID NO: 28270 - DNA, 26 bp, Homo sapiens
gtatgtggtcctcacagcacacagcc

SEQ ID NO: 28271 - DNA, 26 bp, Homo sapiens
tatgtggtcctcacagcacacagcct

SEQ ID NO: 28272 - DNA, 26 bp, Homo sapiens
atgtggtcctcacagcacacagcctg

SEQ ID NO: 28273 - DNA, 26 bp, Homo sapiens
tgtggtcctcacagcacacagcctgg

SEQ ID NO: 28274 - DNA, 26 bp, Homo sapiens
gtggtcctcacagcacacagcctggg

SEQ ID NO: 28275 - DNA, 26 bp, Homo sapiens
tggtcctcacagcacacagcctgggt

SEQ ID NO: 28276 - DNA, 26 bp, Homo sapiens
ggtcctcacagcacacagcctgggta

SEQ ID NO: 28277 - DNA, 26 bp, Homo sapiens
gtcctcacagcacacagcctgggtaa

SEQ ID NO: 28278 - DNA, 26 bp, Homo sapiens
tcctcacagcacacagcctgggtaaa

SEQ ID NO: 28279 - DNA, 26 bp, Homo sapiens
cctcacagcacacagcctgggtaaaa

SEQ ID NO: 28280 - DNA, 26 bp, Homo sapiens
ctcacagcacacagcctgggtaaaag

SEQ ID NO: 28281 - DNA, 26 bp, Homo sapiens
tcacagcacacagcctgggtaaaagg

SEQ ID NO: 28282 - DNA, 26 bp, Homo sapiens
cacagcacacagcctgggtaaaaggg

SEQ ID NO: 28283 - DNA, 26 bp, Homo sapiens
acagcacacagcctgggtaaaagggc

SEQ ID NO: 28284 - DNA, 26 bp, Homo sapiens
cagcacacagcctgggtaaaagggca

SEQ ID NO: 28285 - DNA, 26 bp, Homo sapiens
agcacacagcctgggtaaaagggcag

SEQ ID NO: 28286 - DNA, 26 bp, Homo sapiens
gcacacagcctgggtaaaagggcagc

SEQ ID NO: 28287 - DNA, 26 bp, Homo sapiens
cacacagcctgggtaaaagggcagca

SEQ ID NO: 28288 - DNA, 26 bp, Homo sapiens
acacagcctgggtaaaagggcagcag

SEQ ID NO: 28289 - DNA, 26 bp, Homo sapiens
cacagcctgggtaaaagggcagcagc

SEQ ID NO: 28290 - DNA, 26 bp, Homo sapiens
acagcctgggtaaaagggcagcagcc

SEQ ID NO: 28291 - DNA, 26 bp, Homo sapiens
cagcctgggtaaaagggcagcagccc

SEQ ID NO: 28292 - DNA, 26 bp, Homo sapiens
agcctgggtaaaagggcagcagcccc

SEQ ID NO: 28293 - DNA, 26 bp, Homo sapiens
gcctgggtaaaagggcagcagcccca

SEQ ID NO: 28294 - DNA, 26 bp, Homo sapiens
cctgggtaaaagggcagcagccccag

SEQ ID NO: 28295 - DNA, 26 bp, Homo sapiens
ctgggtaaaagggcagcagccccagg

SEQ ID NO: 28296 - DNA, 26 bp, Homo sapiens
tgggtaaaagggcagcagccccaggc

SEQ ID NO: 28297 - DNA, 26 bp, Homo sapiens
gggtaaaagggcagcagccccaggcc

SEQ ID NO: 28298 - DNA, 26 bp, Homo sapiens
ggtaaaagggcagcagccccaggccc

SEQ ID NO: 28299 - DNA, 26 bp, Homo sapiens
gtaaaagggcagcagccccaggcccc

SEQ ID NO: 28300 - DNA, 26 bp, Homo sapiens
taaaagggcagcagccccaggccccc

SEQ ID NO: 28301 - DNA, 26 bp, Homo sapiens
aaaagggcagcagccccaggcccccg

SEQ ID NO: 28302 - DNA, 26 bp, Homo sapiens
aaagggcagcagccccaggcccccga

SEQ ID NO: 28303 - DNA, 26 bp, Homo sapiens
aagggcagcagccccaggcccccgac

SEQ ID NO: 28304 - DNA, 26 bp, Homo sapiens
agggcagcagccccaggcccccgact

SEQ ID NO: 28305 - DNA, 26 bp, Homo sapiens
gggcagcagccccaggcccccgactg

SEQ ID NO: 28306 - DNA, 26 bp, Homo sapiens
ggcagcagccccaggcccccgactgt

SEQ ID NO: 28307 - DNA, 26 bp, Homo sapiens
gcagcagccccaggcccccgactgta

SEQ ID NO: 28308 - DNA, 26 bp, Homo sapiens
cagcagccccaggcccccgactgtag

SEQ ID NO: 28309 - DNA, 26 bp, Homo sapiens
agcagccccaggcccccgactgtaga

SEQ ID NO: 28310 - DNA, 26 bp, Homo sapiens
gcagccccaggcccccgactgtagac

SEQ ID NO: 28311 - DNA, 26 bp, Homo sapiens
cagccccaggcccccgactgtagacg

SEQ ID NO: 28312 - DNA, 26 bp, Homo sapiens
agccccaggcccccgactgtagacgg

SEQ ID NO: 28313 - DNA, 26 bp, Homo sapiens
gccccaggcccccgactgtagacggc

SEQ ID NO: 28314 - DNA, 26 bp, Homo sapiens
ccccaggcccccgactgtagacggca

SEQ ID NO: 28315 - DNA, 26 bp, Homo sapiens
cccaggcccccgactgtagacggcag

SEQ ID NO: 28316 - DNA, 26 bp, Homo sapiens
ccaggcccccgactgtagacggcagc

SEQ ID NO: 28317 - DNA, 26 bp, Homo sapiens
caggcccccgactgtagacggcagca

SEQ ID NO: 28318 - DNA, 26 bp, Homo sapiens
aggcccccgactgtagacggcagcag

SEQ ID NO: 28319 - DNA, 26 bp, Homo sapiens
ggcccccgactgtagacggcagcagg

SEQ ID NO: 28320 - DNA, 26 bp, Homo sapiens
gcccccgactgtagacggcagcaggt

SEQ ID NO: 28321 - DNA, 26 bp, Homo sapiens
cccccgactgtagacggcagcaggta

SEQ ID NO: 28322 - DNA, 26 bp, Homo sapiens
ccccgactgtagacggcagcaggtat

SEQ ID NO: 28323 - DNA, 26 bp, Homo sapiens
cccgactgtagacggcagcaggtata

SEQ ID NO: 28324 - DNA, 26 bp, Homo sapiens
ccgactgtagacggcagcaggtatag

SEQ ID NO: 28325 - DNA, 26 bp, Homo sapiens
cgactgtagacggcagcaggtatagc

SEQ ID NO: 28326 - DNA, 26 bp, Homo sapiens
gactgtagacggcagcaggtatagcc

SEQ ID NO: 28327 - DNA, 26 bp, Homo sapiens
actgtagacggcagcaggtatagcca

SEQ ID NO: 28328 - DNA, 26 bp, Homo sapiens
ctgtagacggcagcaggtatagccat

SEQ ID NO: 28329 - DNA, 26 bp, Homo sapiens
tgtagacggcagcaggtatagccatc

SEQ ID NO: 28330 - DNA, 26 bp, Homo sapiens
gtagacggcagcaggtatagccatct

SEQ ID NO: 28331 - DNA, 26 bp, Homo sapiens
tagacggcagcaggtatagccatctg

SEQ ID NO: 28332 - DNA, 26 bp, Homo sapiens
agacggcagcaggtatagccatctgg

SEQ ID NO: 28333 - DNA, 26 bp, Homo sapiens
gacggcagcaggtatagccatctggg

SEQ ID NO: 28334 - DNA, 26 bp, Homo sapiens
acggcagcaggtatagccatctgggc

SEQ ID NO: 28335 - DNA, 26 bp, Homo sapiens
cggcagcaggtatagccatctgggca

SEQ ID NO: 28336 - DNA, 26 bp, Homo sapiens
ggcagcaggtatagccatctgggcag

SEQ ID NO: 28337 - DNA, 26 bp, Homo sapiens
gcagcaggtatagccatctgggcagc

SEQ ID NO: 28338 - DNA, 26 bp, Homo sapiens
cagcaggtatagccatctgggcagct

SEQ ID NO: 28339 - DNA, 26 bp, Homo sapiens
agcaggtatagccatctgggcagctc

SEQ ID NO: 28340 - DNA, 26 bp, Homo sapiens
gcaggtatagccatctgggcagctca

SEQ ID NO: 28341 - DNA, 26 bp, Homo sapiens
caggtatagccatctgggcagctcac

SEQ ID NO: 28342 - DNA, 26 bp, Homo sapiens
aggtatagccatctgggcagctcacc

SEQ ID NO: 28343 - DNA, 26 bp, Homo sapiens
ggtatagccatctgggcagctcacct

SEQ ID NO: 28344 - DNA, 26 bp, Homo sapiens
gtatagccatctgggcagctcacctc

SEQ ID NO: 28345 - DNA, 26 bp, Homo sapiens
tatagccatctgggcagctcacctcc

SEQ ID NO: 28346 - DNA, 26 bp, Homo sapiens
atagccatctgggcagctcacctcca

SEQ ID NO: 28347 - DNA, 26 bp, Homo sapiens
tagccatctgggcagctcacctccat

SEQ ID NO: 28348 - DNA, 26 bp, Homo sapiens
agccatctgggcagctcacctccatg

SEQ ID NO: 28349 - DNA, 26 bp, Homo sapiens
gccatctgggcagctcacctccatgt

SEQ ID NO: 28350 - DNA, 26 bp, Homo sapiens
ccatctgggcagctcacctccatgtc

SEQ ID NO: 28351 - DNA, 26 bp, Homo sapiens
catctgggcagctcacctccatgtca

SEQ ID NO: 28352 - DNA, 26 bp, Homo sapiens
atctgggcagctcacctccatgtcac

SEQ ID NO: 28353 - DNA, 26 bp, Homo sapiens
tctgggcagctcacctccatgtcaca

SEQ ID NO: 28354 - DNA, 26 bp, Homo sapiens
ctgggcagctcacctccatgtcacat

SEQ ID NO: 28355 - DNA, 26 bp, Homo sapiens
tgggcagctcacctccatgtcacatt

SEQ ID NO: 28356 - DNA, 26 bp, Homo sapiens
gggcagctcacctccatgtcacattt

SEQ ID NO: 28357 - DNA, 26 bp, Homo sapiens
ggcagctcacctccatgtcacatttc

SEQ ID NO: 28358 - DNA, 26 bp, Homo sapiens
gcagctcacctccatgtcacatttca

SEQ ID NO: 28359 - DNA, 26 bp, Homo sapiens
cagctcacctccatgtcacatttcac

SEQ ID NO: 28360 - DNA, 26 bp, Homo sapiens
agctcacctccatgtcacatttcaca

SEQ ID NO: 28361 - DNA, 26 bp, Homo sapiens
gctcacctccatgtcacatttcacat

SEQ ID NO: 28362 - DNA, 26 bp, Homo sapiens
ctcacctccatgtcacatttcacatc

SEQ ID NO: 28363 - DNA, 26 bp, Homo sapiens
tcacctccatgtcacatttcacatcc

SEQ ID NO: 28364 - DNA, 26 bp, Homo sapiens
cacctccatgtcacatttcacatccc

SEQ ID NO: 28365 - DNA, 26 bp, Homo sapiens
acctccatgtcacatttcacatcccc

SEQ ID NO: 28366 - DNA, 26 bp, Homo sapiens
cctccatgtcacatttcacatccccc

SEQ ID NO: 28367 - DNA, 26 bp, Homo sapiens
ctccatgtcacatttcacatccccca

SEQ ID NO: 28368 - DNA, 26 bp, Homo sapiens
tccatgtcacatttcacatcccccac

SEQ ID NO: 28369 - DNA, 26 bp, Homo sapiens
ccatgtcacatttcacatcccccact

SEQ ID NO: 28370 - DNA, 26 bp, Homo sapiens
catgtcacatttcacatcccccactg

SEQ ID NO: 28371 - DNA, 26 bp, Homo sapiens
atgtcacatttcacatcccccactgt

SEQ ID NO: 28372 - DNA, 26 bp, Homo sapiens
tgtcacatttcacatcccccactgtg

SEQ ID NO: 28373 - DNA, 26 bp, Homo sapiens
gtcacatttcacatcccccactgtgt

SEQ ID NO: 28374 - DNA, 26 bp, Homo sapiens
tcacatttcacatcccccactgtgtg

SEQ ID NO: 28375 - DNA, 26 bp, Homo sapiens
cacatttcacatcccccactgtgtgc

SEQ ID NO: 28376 - DNA, 26 bp, Homo sapiens
acatttcacatcccccactgtgtgcg

SEQ ID NO: 28377 - DNA, 26 bp, Homo sapiens
catttcacatcccccactgtgtgcgc

SEQ ID NO: 28378 - DNA, 26 bp, Homo sapiens
atttcacatcccccactgtgtgcgca

SEQ ID NO: 28379 - DNA, 26 bp, Homo sapiens
tttcacatcccccactgtgtgcgcag

SEQ ID NO: 28380 - DNA, 26 bp, Homo sapiens
ttcacatcccccactgtgtgcgcagg

SEQ ID NO: 28381 - DNA, 26 bp, Homo sapiens
tcacatcccccactgtgtgcgcaggc

SEQ ID NO: 28382 - DNA, 26 bp, Homo sapiens
cacatcccccactgtgtgcgcaggca

SEQ ID NO: 28383 - DNA, 26 bp, Homo sapiens
acatcccccactgtgtgcgcaggcag

SEQ ID NO: 28384 - DNA, 26 bp, Homo sapiens
catcccccactgtgtgcgcaggcagc

SEQ ID NO: 28385 - DNA, 26 bp, Homo sapiens
atcccccactgtgtgcgcaggcagct

SEQ ID NO: 28386 - DNA, 26 bp, Homo sapiens
tcccccactgtgtgcgcaggcagctt

SEQ ID NO: 28387 - DNA, 26 bp, Homo sapiens
cccccactgtgtgcgcaggcagctta

SEQ ID NO: 28388 - DNA, 26 bp, Homo sapiens
ccccactgtgtgcgcaggcagcttag

SEQ ID NO: 28389 - DNA, 26 bp, Homo sapiens
cccactgtgtgcgcaggcagcttagt

SEQ ID NO: 28390 - DNA, 26 bp, Homo sapiens
ccactgtgtgcgcaggcagcttagtg

SEQ ID NO: 28391 - DNA, 26 bp, Homo sapiens
cactgtgtgcgcaggcagcttagtga

SEQ ID NO: 28392 - DNA, 26 bp, Homo sapiens
actgtgtgcgcaggcagcttagtgag

SEQ ID NO: 28393 - DNA, 26 bp, Homo sapiens
ctgtgtgcgcaggcagcttagtgagg

SEQ ID NO: 28394 - DNA, 26 bp, Homo sapiens
tgtgtgcgcaggcagcttagtgagga

SEQ ID NO: 28395 - DNA, 26 bp, Homo sapiens
gtgtgcgcaggcagcttagtgaggag

SEQ ID NO: 28396 - DNA, 26 bp, Homo sapiens
tgtgcgcaggcagcttagtgaggagg

SEQ ID NO: 28397 - DNA, 26 bp, Homo sapiens
gtgcgcaggcagcttagtgaggaggt

SEQ ID NO: 28398 - DNA, 26 bp, Homo sapiens
tgcgcaggcagcttagtgaggaggtc

SEQ ID NO: 28399 - DNA, 26 bp, Homo sapiens
gcgcaggcagcttagtgaggaggtcc

SEQ ID NO: 28400 - DNA, 26 bp, Homo sapiens
cgcaggcagcttagtgaggaggtccg

SEQ ID NO: 28401 - DNA, 26 bp, Homo sapiens
gcaggcagcttagtgaggaggtccgt

SEQ ID NO: 28402 - DNA, 26 bp, Homo sapiens
caggcagcttagtgaggaggtccgtg

SEQ ID NO: 28403 - DNA, 26 bp, Homo sapiens
aggcagcttagtgaggaggtccgtgg

SEQ ID NO: 28404 - DNA, 26 bp, Homo sapiens
ggcagcttagtgaggaggtccgtggt

SEQ ID NO: 28405 - DNA, 26 bp, Homo sapiens
gcagcttagtgaggaggtccgtggta

SEQ ID NO: 28406 - DNA, 26 bp, Homo sapiens
cagcttagtgaggaggtccgtggtag

SEQ ID NO: 28407 - DNA, 26 bp, Homo sapiens
agcttagtgaggaggtccgtggtagc

SEQ ID NO: 28408 - DNA, 26 bp, Homo sapiens
gcttagtgaggaggtccgtggtagcg

SEQ ID NO: 28409 - DNA, 26 bp, Homo sapiens
cttagtgaggaggtccgtggtagcgt

SEQ ID NO: 28410 - DNA, 26 bp, Homo sapiens
ttagtgaggaggtccgtggtagcgtt

SEQ ID NO: 28411 - DNA, 26 bp, Homo sapiens
tagtgaggaggtccgtggtagcgttc

SEQ ID NO: 28412 - DNA, 26 bp, Homo sapiens
agtgaggaggtccgtggtagcgttct

SEQ ID NO: 28413 - DNA, 26 bp, Homo sapiens
gtgaggaggtccgtggtagcgttctc

SEQ ID NO: 28414 - DNA, 26 bp, Homo sapiens
tgaggaggtccgtggtagcgttctcc

SEQ ID NO: 28415 - DNA, 26 bp, Homo sapiens
gaggaggtccgtggtagcgttctcct

SEQ ID NO: 28416 - DNA, 26 bp, Homo sapiens
aggaggtccgtggtagcgttctcctt

SEQ ID NO: 28417 - DNA, 26 bp, Homo sapiens
ggaggtccgtggtagcgttctccttg

SEQ ID NO: 28418 - DNA, 26 bp, Homo sapiens
gaggtccgtggtagcgttctccttgg

SEQ ID NO: 28419 - DNA, 26 bp, Homo sapiens
aggtccgtggtagcgttctccttgga

SEQ ID NO: 28420 - DNA, 26 bp, Homo sapiens
ggtccgtggtagcgttctccttggag

SEQ ID NO: 28421 - DNA, 26 bp, Homo sapiens
gtccgtggtagcgttctccttggaga

SEQ ID NO: 28422 - DNA, 26 bp, Homo sapiens
tccgtggtagcgttctccttggagag

SEQ ID NO: 28423 - DNA, 26 bp, Homo sapiens
ccgtggtagcgttctccttggagagg

SEQ ID NO: 28424 - DNA, 26 bp, Homo sapiens
cgtggtagcgttctccttggagaggc

SEQ ID NO: 28425 - DNA, 26 bp, Homo sapiens
gtggtagcgttctccttggagaggca

SEQ ID NO: 28426 - DNA, 26 bp, Homo sapiens
tggtagcgttctccttggagaggcac

SEQ ID NO: 28427 - DNA, 26 bp, Homo sapiens
ggtagcgttctccttggagaggcact

SEQ ID NO: 28428 - DNA, 26 bp, Homo sapiens
gtagcgttctccttggagaggcactt

SEQ ID NO: 28429 - DNA, 26 bp, Homo sapiens
tagcgttctccttggagaggcactta

SEQ ID NO: 28430 - DNA, 26 bp, Homo sapiens
agcgttctccttggagaggcacttac

SEQ ID NO: 28431 - DNA, 26 bp, Homo sapiens
gcgttctccttggagaggcacttact

SEQ ID NO: 28432 - DNA, 26 bp, Homo sapiens
cgttctccttggagaggcacttactc

SEQ ID NO: 28433 - DNA, 26 bp, Homo sapiens
gttctccttggagaggcacttactct

SEQ ID NO: 28434 - DNA, 26 bp, Homo sapiens
ttctccttggagaggcacttactctg

SEQ ID NO: 28435 - DNA, 26 bp, Homo sapiens
tctccttggagaggcacttactctgg

SEQ ID NO: 28436 - DNA, 26 bp, Homo sapiens
ctccttggagaggcacttactctgga

SEQ ID NO: 28437 - DNA, 26 bp, Homo sapiens
tccttggagaggcacttactctggat

SEQ ID NO: 28438 - DNA, 26 bp, Homo sapiens
ccttggagaggcacttactctggatc

SEQ ID NO: 28439 - DNA, 26 bp, Homo sapiens
cttggagaggcacttactctggatca

SEQ ID NO: 28440 - DNA, 26 bp, Homo sapiens
ttggagaggcacttactctggatcag

SEQ ID NO: 28441 - DNA, 26 bp, Homo sapiens
tggagaggcacttactctggatcagg

SEQ ID NO: 28442 - DNA, 26 bp, Homo sapiens
ggagaggcacttactctggatcaggt

SEQ ID NO: 28443 - DNA, 26 bp, Homo sapiens
gagaggcacttactctggatcaggtc

SEQ ID NO: 28444 - DNA, 26 bp, Homo sapiens
agaggcacttactctggatcaggtca

SEQ ID NO: 28445 - DNA, 26 bp, Homo sapiens
gaggcacttactctggatcaggtcac

SEQ ID NO: 28446 - DNA, 26 bp, Homo sapiens
aggcacttactctggatcaggtcaca

SEQ ID NO: 28447 - DNA, 26 bp, Homo sapiens
ggcacttactctggatcaggtcacac

SEQ ID NO: 28448 - DNA, 26 bp, Homo sapiens
gcacttactctggatcaggtcacaca

SEQ ID NO: 28449 - DNA, 26 bp, Homo sapiens
cacttactctggatcaggtcacacac

SEQ ID NO: 28450 - DNA, 26 bp, Homo sapiens
acttactctggatcaggtcacacaca

SEQ ID NO: 28451 - DNA, 26 bp, Homo sapiens
cttactctggatcaggtcacacacag

SEQ ID NO: 28452 - DNA, 26 bp, Homo sapiens
ttactctggatcaggtcacacacagt

SEQ ID NO: 28453 - DNA, 26 bp, Homo sapiens
tactctggatcaggtcacacacagtg

SEQ ID NO: 28454 - DNA, 26 bp, Homo sapiens
actctggatcaggtcacacacagtgt

SEQ ID NO: 28455 - DNA, 26 bp, Homo sapiens
ctctggatcaggtcacacacagtgtc

SEQ ID NO: 28456 - DNA, 26 bp, Homo sapiens
tctggatcaggtcacacacagtgtct

SEQ ID NO: 28457 - DNA, 26 bp, Homo sapiens
ctggatcaggtcacacacagtgtctt

SEQ ID NO: 28458 - DNA, 26 bp, Homo sapiens
tggatcaggtcacacacagtgtcttg

SEQ ID NO: 28459 - DNA, 26 bp, Homo sapiens
ggatcaggtcacacacagtgtcttgg

SEQ ID NO: 28460 - DNA, 26 bp, Homo sapiens
gatcaggtcacacacagtgtcttggg

SEQ ID NO: 28461 - DNA, 26 bp, Homo sapiens
atcaggtcacacacagtgtcttgggg

SEQ ID NO: 28462 - DNA, 26 bp, Homo sapiens
tcaggtcacacacagtgtcttggggg

SEQ ID NO: 28463 - DNA, 26 bp, Homo sapiens
caggtcacacacagtgtcttgggggc

SEQ ID NO: 28464 - DNA, 26 bp, Homo sapiens
aggtcacacacagtgtcttgggggca

SEQ ID NO: 28465 - DNA, 26 bp, Homo sapiens
ggtcacacacagtgtcttgggggcag

SEQ ID NO: 28466 - DNA, 26 bp, Homo sapiens
gtcacacacagtgtcttgggggcagc

SEQ ID NO: 28467 - DNA, 26 bp, Homo sapiens
tcacacacagtgtcttgggggcagca

SEQ ID NO: 28468 - DNA, 26 bp, Homo sapiens
cacacacagtgtcttgggggcagcag

SEQ ID NO: 28469 - DNA, 26 bp, Homo sapiens
acacacagtgtcttgggggcagcagt

SEQ ID NO: 28470 - DNA, 26 bp, Homo sapiens
cacacagtgtcttgggggcagcagtg

SEQ ID NO: 28471 - DNA, 26 bp, Homo sapiens
acacagtgtcttgggggcagcagtgc

SEQ ID NO: 28472 - DNA, 26 bp, Homo sapiens
cacagtgtcttgggggcagcagtgca

SEQ ID NO: 28473 - DNA, 26 bp, Homo sapiens
acagtgtcttgggggcagcagtgcag

SEQ ID NO: 28474 - DNA, 26 bp, Homo sapiens
cagtgtcttgggggcagcagtgcagg

SEQ ID NO: 28475 - DNA, 26 bp, Homo sapiens
agtgtcttgggggcagcagtgcaggt

SEQ ID NO: 28476 - DNA, 26 bp, Homo sapiens
gtgtcttgggggcagcagtgcaggtg

SEQ ID NO: 28477 - DNA, 26 bp, Homo sapiens
tgtcttgggggcagcagtgcaggtga

SEQ ID NO: 28478 - DNA, 26 bp, Homo sapiens
gtcttgggggcagcagtgcaggtgat

SEQ ID NO: 28479 - DNA, 26 bp, Homo sapiens
tcttgggggcagcagtgcaggtgatc

SEQ ID NO: 28480 - DNA, 26 bp, Homo sapiens
cttgggggcagcagtgcaggtgatcg

SEQ ID NO: 28481 - DNA, 26 bp, Homo sapiens
ttgggggcagcagtgcaggtgatcgg

SEQ ID NO: 28482 - DNA, 26 bp, Homo sapiens
tgggggcagcagtgcaggtgatcgga

SEQ ID NO: 28483 - DNA, 26 bp, Homo sapiens
gggggcagcagtgcaggtgatcggag

SEQ ID NO: 28484 - DNA, 26 bp, Homo sapiens
ggggcagcagtgcaggtgatcggagc

SEQ ID NO: 28485 - DNA, 26 bp, Homo sapiens
gggcagcagtgcaggtgatcggagca

SEQ ID NO: 28486 - DNA, 26 bp, Homo sapiens
ggcagcagtgcaggtgatcggagcag

SEQ ID NO: 28487 - DNA, 26 bp, Homo sapiens
gcagcagtgcaggtgatcggagcagc

SEQ ID NO: 28488 - DNA, 26 bp, Homo sapiens
cagcagtgcaggtgatcggagcagca

SEQ ID NO: 28489 - DNA, 26 bp, Homo sapiens
agcagtgcaggtgatcggagcagcag

SEQ ID NO: 28490 - DNA, 26 bp, Homo sapiens
gcagtgcaggtgatcggagcagcagg

SEQ ID NO: 28491 - DNA, 26 bp, Homo sapiens
cagtgcaggtgatcggagcagcaggt

SEQ ID NO: 28492 - DNA, 26 bp, Homo sapiens
agtgcaggtgatcggagcagcaggtg

SEQ ID NO: 28493 - DNA, 26 bp, Homo sapiens
gtgcaggtgatcggagcagcaggtgg

SEQ ID NO: 28494 - DNA, 26 bp, Homo sapiens
tgcaggtgatcggagcagcaggtggc

SEQ ID NO: 28495 - DNA, 26 bp, Homo sapiens
gcaggtgatcggagcagcaggtggcg

SEQ ID NO: 28496 - DNA, 26 bp, Homo sapiens
caggtgatcggagcagcaggtggcgt

SEQ ID NO: 28497 - DNA, 26 bp, Homo sapiens
aggtgatcggagcagcaggtggcgtt

SEQ ID NO: 28498 - DNA, 26 bp, Homo sapiens
ggtgatcggagcagcaggtggcgttg

SEQ ID NO: 28499 - DNA, 26 bp, Homo sapiens
gtgatcggagcagcaggtggcgttgg

SEQ ID NO: 28500 - DNA, 26 bp, Homo sapiens
tgatcggagcagcaggtggcgttggg

SEQ ID NO: 28501 - DNA, 26 bp, Homo sapiens
gatcggagcagcaggtggcgttgggc

SEQ ID NO: 28502 - DNA, 26 bp, Homo sapiens
atcggagcagcaggtggcgttgggca

SEQ ID NO: 28503 - DNA, 26 bp, Homo sapiens
tcggagcagcaggtggcgttgggcat

SEQ ID NO: 28504 - DNA, 26 bp, Homo sapiens
cggagcagcaggtggcgttgggcatt

SEQ ID NO: 28505 - DNA, 26 bp, Homo sapiens
ggagcagcaggtggcgttgggcattg

SEQ ID NO: 28506 - DNA, 26 bp, Homo sapiens
gagcagcaggtggcgttgggcattgg

SEQ ID NO: 28507 - DNA, 26 bp, Homo sapiens
agcagcaggtggcgttgggcattggg

SEQ ID NO: 28508 - DNA, 26 bp, Homo sapiens
gcagcaggtggcgttgggcattgggc

SEQ ID NO: 28509 - DNA, 26 bp, Homo sapiens
cagcaggtggcgttgggcattgggca

SEQ ID NO: 28510 - DNA, 26 bp, Homo sapiens
agcaggtggcgttgggcattgggcag

SEQ ID NO: 28511 - DNA, 26 bp, Homo sapiens
gcaggtggcgttgggcattgggcagc

SEQ ID NO: 28512 - DNA, 26 bp, Homo sapiens
caggtggcgttgggcattgggcagca

SEQ ID NO: 28513 - DNA, 26 bp, Homo sapiens
aggtggcgttgggcattgggcagcag

SEQ ID NO: 28514 - DNA, 26 bp, Homo sapiens
ggtggcgttgggcattgggcagcagc

SEQ ID NO: 28515 - DNA, 26 bp, Homo sapiens
gtggcgttgggcattgggcagcagcc

SEQ ID NO: 28516 - DNA, 26 bp, Homo sapiens
tggcgttgggcattgggcagcagcca

SEQ ID NO: 28517 - DNA, 26 bp, Homo sapiens
ggcgttgggcattgggcagcagccat

SEQ ID NO: 28518 - DNA, 26 bp, Homo sapiens
gcgttgggcattgggcagcagccata

SEQ ID NO: 28519 - DNA, 26 bp, Homo sapiens
cgttgggcattgggcagcagccatac

SEQ ID NO: 28520 - DNA, 26 bp, Homo sapiens
gttgggcattgggcagcagccatact

SEQ ID NO: 28521 - DNA, 26 bp, Homo sapiens
ttgggcattgggcagcagccatactt

SEQ ID NO: 28522 - DNA, 26 bp, Homo sapiens
tgggcattgggcagcagccatacttc

SEQ ID NO: 28523 - DNA, 26 bp, Homo sapiens
gggcattgggcagcagccatacttcc

SEQ ID NO: 28524 - DNA, 26 bp, Homo sapiens
ggcattgggcagcagccatacttccc

SEQ ID NO: 28525 - DNA, 26 bp, Homo sapiens
gcattgggcagcagccatacttccca

SEQ ID NO: 28526 - DNA, 26 bp, Homo sapiens
cattgggcagcagccatacttcccac

SEQ ID NO: 28527 - DNA, 26 bp, Homo sapiens
attgggcagcagccatacttcccact

SEQ ID NO: 28528 - DNA, 26 bp, Homo sapiens
ttgggcagcagccatacttcccactg

SEQ ID NO: 28529 - DNA, 26 bp, Homo sapiens
tgggcagcagccatacttcccactgg

SEQ ID NO: 28530 - DNA, 26 bp, Homo sapiens
gggcagcagccatacttcccactggg

SEQ ID NO: 28531 - DNA, 26 bp, Homo sapiens
ggcagcagccatacttcccactgggc

SEQ ID NO: 28532 - DNA, 26 bp, Homo sapiens
gcagcagccatacttcccactgggca

SEQ ID NO: 28533 - DNA, 26 bp, Homo sapiens
cagcagccatacttcccactgggcag

SEQ ID NO: 28534 - DNA, 26 bp, Homo sapiens
agcagccatacttcccactgggcagc

SEQ ID NO: 28535 - DNA, 26 bp, Homo sapiens
gcagccatacttcccactgggcagct

SEQ ID NO: 28536 - DNA, 26 bp, Homo sapiens
cagccatacttcccactgggcagctc

SEQ ID NO: 28537 - DNA, 26 bp, Homo sapiens
agccatacttcccactgggcagctca

SEQ ID NO: 28538 - DNA, 26 bp, Homo sapiens
gccatacttcccactgggcagctcac

SEQ ID NO: 28539 - DNA, 26 bp, Homo sapiens
ccatacttcccactgggcagctcaca

SEQ ID NO: 28540 - DNA, 26 bp, Homo sapiens
catacttcccactgggcagctcacag

SEQ ID NO: 28541 - DNA, 26 bp, Homo sapiens
atacttcccactgggcagctcacagc

SEQ ID NO: 28542 - DNA, 26 bp, Homo sapiens
tacttcccactgggcagctcacagca

SEQ ID NO: 28543 - DNA, 26 bp, Homo sapiens
acttcccactgggcagctcacagcag

SEQ ID NO: 28544 - DNA, 26 bp, Homo sapiens
cttcccactgggcagctcacagcagg

SEQ ID NO: 28545 - DNA, 26 bp, Homo sapiens
ttcccactgggcagctcacagcaggt

SEQ ID NO: 28546 - DNA, 26 bp, Homo sapiens
tcccactgggcagctcacagcaggta

SEQ ID NO: 28547 - DNA, 26 bp, Homo sapiens
cccactgggcagctcacagcaggtag

SEQ ID NO: 28548 - DNA, 26 bp, Homo sapiens
ccactgggcagctcacagcaggtaga

SEQ ID NO: 28549 - DNA, 26 bp, Homo sapiens
cactgggcagctcacagcaggtagaa

SEQ ID NO: 28550 - DNA, 26 bp, Homo sapiens
actgggcagctcacagcaggtagaac

SEQ ID NO: 28551 - DNA, 26 bp, Homo sapiens
ctgggcagctcacagcaggtagaacc

SEQ ID NO: 28552 - DNA, 26 bp, Homo sapiens
tgggcagctcacagcaggtagaacca

SEQ ID NO: 28553 - DNA, 26 bp, Homo sapiens
gggcagctcacagcaggtagaaccat

SEQ ID NO: 28554 - DNA, 26 bp, Homo sapiens
ggcagctcacagcaggtagaaccatc

SEQ ID NO: 28555 - DNA, 26 bp, Homo sapiens
gcagctcacagcaggtagaaccatca

SEQ ID NO: 28556 - DNA, 26 bp, Homo sapiens
cagctcacagcaggtagaaccatcag

SEQ ID NO: 28557 - DNA, 26 bp, Homo sapiens
agctcacagcaggtagaaccatcagg

SEQ ID NO: 28558 - DNA, 26 bp, Homo sapiens
gctcacagcaggtagaaccatcaggg

SEQ ID NO: 28559 - DNA, 26 bp, Homo sapiens
ctcacagcaggtagaaccatcagggc

SEQ ID NO: 28560 - DNA, 26 bp, Homo sapiens
tcacagcaggtagaaccatcagggca

SEQ ID NO: 28561 - DNA, 26 bp, Homo sapiens
cacagcaggtagaaccatcagggcac

SEQ ID NO: 28562 - DNA, 26 bp, Homo sapiens
acagcaggtagaaccatcagggcacc

SEQ ID NO: 28563 - DNA, 26 bp, Homo sapiens
cagcaggtagaaccatcagggcaccg

SEQ ID NO: 28564 - DNA, 26 bp, Homo sapiens
agcaggtagaaccatcagggcaccgg

SEQ ID NO: 28565 - DNA, 26 bp, Homo sapiens
gcaggtagaaccatcagggcaccggg

SEQ ID NO: 28566 - DNA, 26 bp, Homo sapiens
caggtagaaccatcagggcaccggga

SEQ ID NO: 28567 - DNA, 26 bp, Homo sapiens
aggtagaaccatcagggcaccgggac

SEQ ID NO: 28568 - DNA, 26 bp, Homo sapiens
ggtagaaccatcagggcaccgggacc

SEQ ID NO: 28569 - DNA, 26 bp, Homo sapiens
gtagaaccatcagggcaccgggaccg

SEQ ID NO: 28570 - DNA, 26 bp, Homo sapiens
tagaaccatcagggcaccgggaccgt

SEQ ID NO: 28571 - DNA, 26 bp, Homo sapiens
agaaccatcagggcaccgggaccgtg

SEQ ID NO: 28572 - DNA, 26 bp, Homo sapiens
gaaccatcagggcaccgggaccgtgc

SEQ ID NO: 28573 - DNA, 26 bp, Homo sapiens
aaccatcagggcaccgggaccgtgcg

SEQ ID NO: 28574 - DNA, 26 bp, Homo sapiens
accatcagggcaccgggaccgtgcgt

SEQ ID NO: 28575 - DNA, 26 bp, Homo sapiens
ccatcagggcaccgggaccgtgcgtc

SEQ ID NO: 28576 - DNA, 26 bp, Homo sapiens
catcagggcaccgggaccgtgcgtcc

SEQ ID NO: 28577 - DNA, 26 bp, Homo sapiens
atcagggcaccgggaccgtgcgtccg

SEQ ID NO: 28578 - DNA, 26 bp, Homo sapiens
tcagggcaccgggaccgtgcgtccgg

SEQ ID NO: 28579 - DNA, 26 bp, Homo sapiens
cagggcaccgggaccgtgcgtccgga

SEQ ID NO: 28580 - DNA, 26 bp, Homo sapiens
agggcaccgggaccgtgcgtccggac

SEQ ID NO: 28581 - DNA, 26 bp, Homo sapiens
gggcaccgggaccgtgcgtccggaca

SEQ ID NO: 28582 - DNA, 26 bp, Homo sapiens
ggcaccgggaccgtgcgtccggacac

SEQ ID NO: 28583 - DNA, 26 bp, Homo sapiens
gcaccgggaccgtgcgtccggacaca

SEQ ID NO: 28584 - DNA, 26 bp, Homo sapiens
caccgggaccgtgcgtccggacacat

SEQ ID NO: 28585 - DNA, 26 bp, Homo sapiens
accgggaccgtgcgtccggacacatg

SEQ ID NO: 28586 - DNA, 26 bp, Homo sapiens
ccgggaccgtgcgtccggacacatga

SEQ ID NO: 28587 - DNA, 26 bp, Homo sapiens
cgggaccgtgcgtccggacacatgac

SEQ ID NO: 28588 - DNA, 26 bp, Homo sapiens
gggaccgtgcgtccggacacatgacc

SEQ ID NO: 28589 - DNA, 26 bp, Homo sapiens
ggaccgtgcgtccggacacatgaccg

SEQ ID NO: 28590 - DNA, 26 bp, Homo sapiens
gaccgtgcgtccggacacatgaccga

SEQ ID NO: 28591 - DNA, 26 bp, Homo sapiens
accgtgcgtccggacacatgaccgag

SEQ ID NO: 28592 - DNA, 26 bp, Homo sapiens
ccgtgcgtccggacacatgaccgagc

SEQ ID NO: 28593 - DNA, 26 bp, Homo sapiens
cgtgcgtccggacacatgaccgagct

SEQ ID NO: 28594 - DNA, 26 bp, Homo sapiens
gtgcgtccggacacatgaccgagctg

SEQ ID NO: 28595 - DNA, 26 bp, Homo sapiens
tgcgtccggacacatgaccgagctgg

SEQ ID NO: 28596 - DNA, 26 bp, Homo sapiens
gcgtccggacacatgaccgagctgga

SEQ ID NO: 28597 - DNA, 26 bp, Homo sapiens
cgtccggacacatgaccgagctggac

SEQ ID NO: 28598 - DNA, 26 bp, Homo sapiens
gtccggacacatgaccgagctggaca

SEQ ID NO: 28599 - DNA, 26 bp, Homo sapiens
tccggacacatgaccgagctggacaa

SEQ ID NO: 28600 - DNA, 26 bp, Homo sapiens
ccggacacatgaccgagctggacaag

SEQ ID NO: 28601 - DNA, 26 bp, Homo sapiens
cggacacatgaccgagctggacaagg

SEQ ID NO: 28602 - DNA, 26 bp, Homo sapiens
ggacacatgaccgagctggacaaggc

SEQ ID NO: 28603 - DNA, 26 bp, Homo sapiens
gacacatgaccgagctggacaaggcc

SEQ ID NO: 28604 - DNA, 26 bp, Homo sapiens
acacatgaccgagctggacaaggcca

SEQ ID NO: 28605 - DNA, 26 bp, Homo sapiens
cacatgaccgagctggacaaggccac

SEQ ID NO: 28606 - DNA, 26 bp, Homo sapiens
acatgaccgagctggacaaggccact

SEQ ID NO: 28607 - DNA, 26 bp, Homo sapiens
catgaccgagctggacaaggccactg

SEQ ID NO: 28608 - DNA, 26 bp, Homo sapiens
atgaccgagctggacaaggccactgc

SEQ ID NO: 28609 - DNA, 26 bp, Homo sapiens
tgaccgagctggacaaggccactgcc

SEQ ID NO: 28610 - DNA, 26 bp, Homo sapiens
gaccgagctggacaaggccactgccc

SEQ ID NO: 28611 - DNA, 26 bp, Homo sapiens
accgagctggacaaggccactgccct

SEQ ID NO: 28612 - DNA, 26 bp, Homo sapiens
ccgagctggacaaggccactgccctg

SEQ ID NO: 28613 - DNA, 26 bp, Homo sapiens
cgagctggacaaggccactgccctgt

SEQ ID NO: 28614 - DNA, 26 bp, Homo sapiens
gagctggacaaggccactgccctgtt

SEQ ID NO: 28615 - DNA, 26 bp, Homo sapiens
agctggacaaggccactgccctgtta

SEQ ID NO: 28616 - DNA, 26 bp, Homo sapiens
gctggacaaggccactgccctgttag

SEQ ID NO: 28617 - DNA, 26 bp, Homo sapiens
ctggacaaggccactgccctgttagt

SEQ ID NO: 28618 - DNA, 26 bp, Homo sapiens
tggacaaggccactgccctgttagtc

SEQ ID NO: 28619 - DNA, 26 bp, Homo sapiens
ggacaaggccactgccctgttagtcc

SEQ ID NO: 28620 - DNA, 26 bp, Homo sapiens
gacaaggccactgccctgttagtcct

SEQ ID NO: 28621 - DNA, 26 bp, Homo sapiens
acaaggccactgccctgttagtcctc

SEQ ID NO: 28622 - DNA, 26 bp, Homo sapiens
caaggccactgccctgttagtcctct

SEQ ID NO: 28623 - DNA, 26 bp, Homo sapiens
aaggccactgccctgttagtcctctg

SEQ ID NO: 28624 - DNA, 26 bp, Homo sapiens
aggccactgccctgttagtcctctgg

SEQ ID NO: 28625 - DNA, 26 bp, Homo sapiens
ggccactgccctgttagtcctctggg

SEQ ID NO: 28626 - DNA, 26 bp, Homo sapiens
gccactgccctgttagtcctctgggc

SEQ ID NO: 28627 - DNA, 26 bp, Homo sapiens
ccactgccctgttagtcctctgggca

SEQ ID NO: 28628 - DNA, 26 bp, Homo sapiens
cactgccctgttagtcctctgggcag

SEQ ID NO: 28629 - DNA, 26 bp, Homo sapiens
actgccctgttagtcctctgggcagg

SEQ ID NO: 28630 - DNA, 26 bp, Homo sapiens
ctgccctgttagtcctctgggcaggg

SEQ ID NO: 28631 - DNA, 26 bp, Homo sapiens
tgccctgttagtcctctgggcaggga

SEQ ID NO: 28632 - DNA, 26 bp, Homo sapiens
gccctgttagtcctctgggcagggag

SEQ ID NO: 28633 - DNA, 26 bp, Homo sapiens
ccctgttagtcctctgggcagggagc

SEQ ID NO: 28634 - DNA, 26 bp, Homo sapiens
cctgttagtcctctgggcagggagct

SEQ ID NO: 28635 - DNA, 26 bp, Homo sapiens
ctgttagtcctctgggcagggagctt

SEQ ID NO: 28636 - DNA, 26 bp, Homo sapiens
tgttagtcctctgggcagggagcttc

SEQ ID NO: 28637 - DNA, 26 bp, Homo sapiens
gttagtcctctgggcagggagcttct

SEQ ID NO: 28638 - DNA, 26 bp, Homo sapiens
ttagtcctctgggcagggagcttctt

SEQ ID NO: 28639 - DNA, 26 bp, Homo sapiens
tagtcctctgggcagggagcttcttt

SEQ ID NO: 28640 - DNA, 26 bp, Homo sapiens
agtcctctgggcagggagcttctttg

SEQ ID NO: 28641 - DNA, 26 bp, Homo sapiens
gtcctctgggcagggagcttctttgc

SEQ ID NO: 28642 - DNA, 26 bp, Homo sapiens
tcctctgggcagggagcttctttgcc

SEQ ID NO: 28643 - DNA, 26 bp, Homo sapiens
cctctgggcagggagcttctttgcca

SEQ ID NO: 28644 - DNA, 26 bp, Homo sapiens
ctctgggcagggagcttctttgccag

SEQ ID NO: 28645 - DNA, 26 bp, Homo sapiens
tctgggcagggagcttctttgccagg

SEQ ID NO: 28646 - DNA, 26 bp, Homo sapiens
ctgggcagggagcttctttgccaggg

SEQ ID NO: 28647 - DNA, 26 bp, Homo sapiens
tgggcagggagcttctttgccagggg

SEQ ID NO: 28648 - DNA, 26 bp, Homo sapiens
gggcagggagcttctttgccaggggg

SEQ ID NO: 28649 - DNA, 26 bp, Homo sapiens
ggcagggagcttctttgccagggggt

SEQ ID NO: 28650 - DNA, 26 bp, Homo sapiens
gcagggagcttctttgccagggggtg

SEQ ID NO: 28651 - DNA, 26 bp, Homo sapiens
cagggagcttctttgccagggggtgg

SEQ ID NO: 28652 - DNA, 26 bp, Homo sapiens
agggagcttctttgccagggggtggg

SEQ ID NO: 28653 - DNA, 26 bp, Homo sapiens
gggagcttctttgccagggggtgggt

SEQ ID NO: 28654 - DNA, 26 bp, Homo sapiens
ggagcttctttgccagggggtgggtg

SEQ ID NO: 28655 - DNA, 26 bp, Homo sapiens
gagcttctttgccagggggtgggtgc

SEQ ID NO: 28656 - DNA, 26 bp, Homo sapiens
agcttctttgccagggggtgggtgcc

SEQ ID NO: 28657 - DNA, 26 bp, Homo sapiens
gcttctttgccagggggtgggtgccc

SEQ ID NO: 28658 - DNA, 26 bp, Homo sapiens
cttctttgccagggggtgggtgcccg

SEQ ID NO: 28659 - DNA, 26 bp, Homo sapiens
ttctttgccagggggtgggtgcccgt

SEQ ID NO: 28660 - DNA, 26 bp, Homo sapiens
tctttgccagggggtgggtgcccgtg

SEQ ID NO: 28661 - DNA, 26 bp, Homo sapiens
ctttgccagggggtgggtgcccgtgg

SEQ ID NO: 28662 - DNA, 26 bp, Homo sapiens
tttgccagggggtgggtgcccgtggg

SEQ ID NO: 28663 - DNA, 26 bp, Homo sapiens
ttgccagggggtgggtgcccgtgggt

SEQ ID NO: 28664 - DNA, 26 bp, Homo sapiens
tgccagggggtgggtgcccgtgggtg

SEQ ID NO: 28665 - DNA, 26 bp, Homo sapiens
gccagggggtgggtgcccgtgggtgt

SEQ ID NO: 28666 - DNA, 26 bp, Homo sapiens
ccagggggtgggtgcccgtgggtgtg

SEQ ID NO: 28667 - DNA, 26 bp, Homo sapiens
cagggggtgggtgcccgtgggtgtga

SEQ ID NO: 28668 - DNA, 26 bp, Homo sapiens
agggggtgggtgcccgtgggtgtgat

SEQ ID NO: 28669 - DNA, 26 bp, Homo sapiens
gggggtgggtgcccgtgggtgtgatg

SEQ ID NO: 28670 - DNA, 26 bp, Homo sapiens
ggggtgggtgcccgtgggtgtgatgc

SEQ ID NO: 28671 - DNA, 26 bp, Homo sapiens
gggtgggtgcccgtgggtgtgatgca

SEQ ID NO: 28672 - DNA, 26 bp, Homo sapiens
ggtgggtgcccgtgggtgtgatgcag

SEQ ID NO: 28673 - DNA, 26 bp, Homo sapiens
gtgggtgcccgtgggtgtgatgcagc

SEQ ID NO: 28674 - DNA, 26 bp, Homo sapiens
tgggtgcccgtgggtgtgatgcagcg

SEQ ID NO: 28675 - DNA, 26 bp, Homo sapiens
gggtgcccgtgggtgtgatgcagcgg

SEQ ID NO: 28676 - DNA, 26 bp, Homo sapiens
ggtgcccgtgggtgtgatgcagcggg

SEQ ID NO: 28677 - DNA, 26 bp, Homo sapiens
gtgcccgtgggtgtgatgcagcgggt

SEQ ID NO: 28678 - DNA, 26 bp, Homo sapiens
tgcccgtgggtgtgatgcagcgggtg

SEQ ID NO: 28679 - DNA, 26 bp, Homo sapiens
gcccgtgggtgtgatgcagcgggtgt

SEQ ID NO: 28680 - DNA, 26 bp, Homo sapiens
cccgtgggtgtgatgcagcgggtgtg

SEQ ID NO: 28681 - DNA, 26 bp, Homo sapiens
ccgtgggtgtgatgcagcgggtgtga

SEQ ID NO: 28682 - DNA, 26 bp, Homo sapiens
cgtgggtgtgatgcagcgggtgtgaa

SEQ ID NO: 28683 - DNA, 26 bp, Homo sapiens
gtgggtgtgatgcagcgggtgtgaac

SEQ ID NO: 28684 - DNA, 26 bp, Homo sapiens
tgggtgtgatgcagcgggtgtgaacc

SEQ ID NO: 28685 - DNA, 26 bp, Homo sapiens
gggtgtgatgcagcgggtgtgaacca

SEQ ID NO: 28686 - DNA, 26 bp, Homo sapiens
ggtgtgatgcagcgggtgtgaaccag

SEQ ID NO: 28687 - DNA, 26 bp, Homo sapiens
gtgtgatgcagcgggtgtgaaccagg

SEQ ID NO: 28688 - DNA, 26 bp, Homo sapiens
tgtgatgcagcgggtgtgaaccaggt

SEQ ID NO: 28689 - DNA, 26 bp, Homo sapiens
gtgatgcagcgggtgtgaaccaggtc

SEQ ID NO: 28690 - DNA, 26 bp, Homo sapiens
tgatgcagcgggtgtgaaccaggtcg

SEQ ID NO: 28691 - DNA, 26 bp, Homo sapiens
gatgcagcgggtgtgaaccaggtcgc

SEQ ID NO: 28692 - DNA, 26 bp, Homo sapiens
atgcagcgggtgtgaaccaggtcgca

SEQ ID NO: 28693 - DNA, 26 bp, Homo sapiens
tgcagcgggtgtgaaccaggtcgcag

SEQ ID NO: 28694 - DNA, 26 bp, Homo sapiens
gcagcgggtgtgaaccaggtcgcaga

SEQ ID NO: 28695 - DNA, 26 bp, Homo sapiens
cagcgggtgtgaaccaggtcgcagaa

SEQ ID NO: 28696 - DNA, 26 bp, Homo sapiens
agcgggtgtgaaccaggtcgcagaag

SEQ ID NO: 28697 - DNA, 26 bp, Homo sapiens
gcgggtgtgaaccaggtcgcagaagg

SEQ ID NO: 28698 - DNA, 26 bp, Homo sapiens
cgggtgtgaaccaggtcgcagaaggc

SEQ ID NO: 28699 - DNA, 26 bp, Homo sapiens
gggtgtgaaccaggtcgcagaaggca

SEQ ID NO: 28700 - DNA, 26 bp, Homo sapiens
ggtgtgaaccaggtcgcagaaggcac

SEQ ID NO: 28701 - DNA, 26 bp, Homo sapiens
gtgtgaaccaggtcgcagaaggcacc

SEQ ID NO: 28702 - DNA, 26 bp, Homo sapiens
tgtgaaccaggtcgcagaaggcaccg

SEQ ID NO: 28703 - DNA, 26 bp, Homo sapiens
gtgaaccaggtcgcagaaggcaccgt

SEQ ID NO: 28704 - DNA, 26 bp, Homo sapiens
tgaaccaggtcgcagaaggcaccgtg

SEQ ID NO: 28705 - DNA, 26 bp, Homo sapiens
gaaccaggtcgcagaaggcaccgtgc

SEQ ID NO: 28706 - DNA, 26 bp, Homo sapiens
aaccaggtcgcagaaggcaccgtgcg

SEQ ID NO: 28707 - DNA, 26 bp, Homo sapiens
accaggtcgcagaaggcaccgtgcgg

SEQ ID NO: 28708 - DNA, 26 bp, Homo sapiens
ccaggtcgcagaaggcaccgtgcgga

SEQ ID NO: 28709 - DNA, 26 bp, Homo sapiens
caggtcgcagaaggcaccgtgcggac

SEQ ID NO: 28710 - DNA, 26 bp, Homo sapiens
aggtcgcagaaggcaccgtgcggaca

SEQ ID NO: 28711 - DNA, 26 bp, Homo sapiens
ggtcgcagaaggcaccgtgcggacag

SEQ ID NO: 28712 - DNA, 26 bp, Homo sapiens
gtcgcagaaggcaccgtgcggacagc

SEQ ID NO: 28713 - DNA, 26 bp, Homo sapiens
tcgcagaaggcaccgtgcggacagca

SEQ ID NO: 28714 - DNA, 26 bp, Homo sapiens
cgcagaaggcaccgtgcggacagcag

SEQ ID NO: 28715 - DNA, 26 bp, Homo sapiens
gcagaaggcaccgtgcggacagcagt

SEQ ID NO: 28716 - DNA, 26 bp, Homo sapiens
cagaaggcaccgtgcggacagcagtg

SEQ ID NO: 28717 - DNA, 26 bp, Homo sapiens
agaaggcaccgtgcggacagcagtgc

SEQ ID NO: 28718 - DNA, 26 bp, Homo sapiens
gaaggcaccgtgcggacagcagtgca

SEQ ID NO: 28719 - DNA, 26 bp, Homo sapiens
aaggcaccgtgcggacagcagtgcac

SEQ ID NO: 28720 - DNA, 26 bp, Homo sapiens
aggcaccgtgcggacagcagtgcacc

SEQ ID NO: 28721 - DNA, 26 bp, Homo sapiens
ggcaccgtgcggacagcagtgcaccc

SEQ ID NO: 28722 - DNA, 26 bp, Homo sapiens
gcaccgtgcggacagcagtgcaccct

SEQ ID NO: 28723 - DNA, 26 bp, Homo sapiens
caccgtgcggacagcagtgcaccctg

SEQ ID NO: 28724 - DNA, 26 bp, Homo sapiens
accgtgcggacagcagtgcaccctgt

SEQ ID NO: 28725 - DNA, 26 bp, Homo sapiens
ccgtgcggacagcagtgcaccctgtc

SEQ ID NO: 28726 - DNA, 26 bp, Homo sapiens
cgtgcggacagcagtgcaccctgtct

SEQ ID NO: 28727 - DNA, 26 bp, Homo sapiens
gtgcggacagcagtgcaccctgtctt

SEQ ID NO: 28728 - DNA, 26 bp, Homo sapiens
tgcggacagcagtgcaccctgtcttc

SEQ ID NO: 28729 - DNA, 26 bp, Homo sapiens
gcggacagcagtgcaccctgtcttca

SEQ ID NO: 28730 - DNA, 26 bp, Homo sapiens
cggacagcagtgcaccctgtcttcac

SEQ ID NO: 28731 - DNA, 26 bp, Homo sapiens
ggacagcagtgcaccctgtcttcaca

SEQ ID NO: 28732 - DNA, 26 bp, Homo sapiens
gacagcagtgcaccctgtcttcacag

SEQ ID NO: 28733 - DNA, 26 bp, Homo sapiens
acagcagtgcaccctgtcttcacagc

SEQ ID NO: 28734 - DNA, 26 bp, Homo sapiens
cagcagtgcaccctgtcttcacagca

SEQ ID NO: 28735 - DNA, 26 bp, Homo sapiens
agcagtgcaccctgtcttcacagcag

SEQ ID NO: 28736 - DNA, 26 bp, Homo sapiens
gcagtgcaccctgtcttcacagcagg

SEQ ID NO: 28737 - DNA, 26 bp, Homo sapiens
cagtgcaccctgtcttcacagcagga

SEQ ID NO: 28738 - DNA, 26 bp, Homo sapiens
agtgcaccctgtcttcacagcaggaa

SEQ ID NO: 28739 - DNA, 26 bp, Homo sapiens
gtgcaccctgtcttcacagcaggaag

SEQ ID NO: 28740 - DNA, 26 bp, Homo sapiens
tgcaccctgtcttcacagcaggaagc

SEQ ID NO: 28741 - DNA, 26 bp, Homo sapiens
gcaccctgtcttcacagcaggaagcc

SEQ ID NO: 28742 - DNA, 26 bp, Homo sapiens
caccctgtcttcacagcaggaagcct

SEQ ID NO: 28743 - DNA, 26 bp, Homo sapiens
accctgtcttcacagcaggaagcctg

SEQ ID NO: 28744 - DNA, 26 bp, Homo sapiens
ccctgtcttcacagcaggaagcctgg

SEQ ID NO: 28745 - DNA, 26 bp, Homo sapiens
cctgtcttcacagcaggaagcctggg

SEQ ID NO: 28746 - DNA, 26 bp, Homo sapiens
ctgtcttcacagcaggaagcctgggg

SEQ ID NO: 28747 - DNA, 26 bp, Homo sapiens
tgtcttcacagcaggaagcctggggc

SEQ ID NO: 28748 - DNA, 26 bp, Homo sapiens
gtcttcacagcaggaagcctggggca

SEQ ID NO: 28749 - DNA, 26 bp, Homo sapiens
tcttcacagcaggaagcctggggcat

SEQ ID NO: 28750 - DNA, 26 bp, Homo sapiens
cttcacagcaggaagcctggggcatg

SEQ ID NO: 28751 - DNA, 26 bp, Homo sapiens
ttcacagcaggaagcctggggcatgg

SEQ ID NO: 28752 - DNA, 26 bp, Homo sapiens
tcacagcaggaagcctggggcatggg

SEQ ID NO: 28753 - DNA, 26 bp, Homo sapiens
cacagcaggaagcctggggcatgggg

SEQ ID NO: 28754 - DNA, 26 bp, Homo sapiens
acagcaggaagcctggggcatggggc

SEQ ID NO: 28755 - DNA, 26 bp, Homo sapiens
cagcaggaagcctggggcatggggca

SEQ ID NO: 28756 - DNA, 26 bp, Homo sapiens
agcaggaagcctggggcatggggcag

SEQ ID NO: 28757 - DNA, 26 bp, Homo sapiens
gcaggaagcctggggcatggggcagc

SEQ ID NO: 28758 - DNA, 26 bp, Homo sapiens
caggaagcctggggcatggggcagca

SEQ ID NO: 28759 - DNA, 26 bp, Homo sapiens
aggaagcctggggcatggggcagcac

SEQ ID NO: 28760 - DNA, 26 bp, Homo sapiens
ggaagcctggggcatggggcagcacc

SEQ ID NO: 28761 - DNA, 26 bp, Homo sapiens
gaagcctggggcatggggcagcaccc

SEQ ID NO: 28762 - DNA, 26 bp, Homo sapiens
aagcctggggcatggggcagcacccc

SEQ ID NO: 28763 - DNA, 26 bp, Homo sapiens
agcctggggcatggggcagcaccccc

SEQ ID NO: 28764 - DNA, 26 bp, Homo sapiens
gcctggggcatggggcagcaccccca

SEQ ID NO: 28765 - DNA, 26 bp, Homo sapiens
cctggggcatggggcagcacccccag

SEQ ID NO: 28766 - DNA, 26 bp, Homo sapiens
ctggggcatggggcagcacccccagg

SEQ ID NO: 28767 - DNA, 26 bp, Homo sapiens
tggggcatggggcagcacccccagga

SEQ ID NO: 28768 - DNA, 26 bp, Homo sapiens
ggggcatggggcagcacccccaggag

SEQ ID NO: 28769 - DNA, 26 bp, Homo sapiens
gggcatggggcagcacccccaggagc

SEQ ID NO: 28770 - DNA, 26 bp, Homo sapiens
ggcatggggcagcacccccaggagcc

SEQ ID NO: 28771 - DNA, 26 bp, Homo sapiens
gcatggggcagcacccccaggagcca

SEQ ID NO: 28772 - DNA, 26 bp, Homo sapiens
catggggcagcacccccaggagccat

SEQ ID NO: 28773 - DNA, 26 bp, Homo sapiens
atggggcagcacccccaggagccatc

SEQ ID NO: 28774 - DNA, 26 bp, Homo sapiens
tggggcagcacccccaggagccatcg

SEQ ID NO: 28775 - DNA, 26 bp, Homo sapiens
ggggcagcacccccaggagccatcga

SEQ ID NO: 28776 - DNA, 26 bp, Homo sapiens
gggcagcacccccaggagccatcgac

SEQ ID NO: 28777 - DNA, 26 bp, Homo sapiens
ggcagcacccccaggagccatcgacc

SEQ ID NO: 28778 - DNA, 26 bp, Homo sapiens
gcagcacccccaggagccatcgacca

SEQ ID NO: 28779 - DNA, 26 bp, Homo sapiens
cagcacccccaggagccatcgaccat

SEQ ID NO: 28780 - DNA, 26 bp, Homo sapiens
agcacccccaggagccatcgaccata

SEQ ID NO: 28781 - DNA, 26 bp, Homo sapiens
gcacccccaggagccatcgaccataa

SEQ ID NO: 28782 - DNA, 26 bp, Homo sapiens
cacccccaggagccatcgaccataac

SEQ ID NO: 28783 - DNA, 26 bp, Homo sapiens
acccccaggagccatcgaccataaca

SEQ ID NO: 28784 - DNA, 26 bp, Homo sapiens
cccccaggagccatcgaccataacac

SEQ ID NO: 28785 - DNA, 26 bp, Homo sapiens
ccccaggagccatcgaccataacaca

SEQ ID NO: 28786 - DNA, 26 bp, Homo sapiens
cccaggagccatcgaccataacacag

SEQ ID NO: 28787 - DNA, 26 bp, Homo sapiens
ccaggagccatcgaccataacacagc

SEQ ID NO: 28788 - DNA, 26 bp, Homo sapiens
caggagccatcgaccataacacagca

SEQ ID NO: 28789 - DNA, 26 bp, Homo sapiens
aggagccatcgaccataacacagcac

SEQ ID NO: 28790 - DNA, 26 bp, Homo sapiens
ggagccatcgaccataacacagcacg

SEQ ID NO: 28791 - DNA, 26 bp, Homo sapiens
gagccatcgaccataacacagcacgt

SEQ ID NO: 28792 - DNA, 26 bp, Homo sapiens
agccatcgaccataacacagcacgtg

SEQ ID NO: 28793 - DNA, 26 bp, Homo sapiens
gccatcgaccataacacagcacgtgg

SEQ ID NO: 28794 - DNA, 26 bp, Homo sapiens
ccatcgaccataacacagcacgtgga

SEQ ID NO: 28795 - DNA, 26 bp, Homo sapiens
catcgaccataacacagcacgtggag

SEQ ID NO: 28796 - DNA, 26 bp, Homo sapiens
atcgaccataacacagcacgtggaga

SEQ ID NO: 28797 - DNA, 26 bp, Homo sapiens
tcgaccataacacagcacgtggagaa

SEQ ID NO: 28798 - DNA, 26 bp, Homo sapiens
cgaccataacacagcacgtggagaag

SEQ ID NO: 28799 - DNA, 26 bp, Homo sapiens
gaccataacacagcacgtggagaagt

SEQ ID NO: 28800 - DNA, 26 bp, Homo sapiens
accataacacagcacgtggagaagtc

SEQ ID NO: 28801 - DNA, 26 bp, Homo sapiens
ccataacacagcacgtggagaagtcc

SEQ ID NO: 28802 - DNA, 26 bp, Homo sapiens
cataacacagcacgtggagaagtccg

SEQ ID NO: 28803 - DNA, 26 bp, Homo sapiens
ataacacagcacgtggagaagtccgg

SEQ ID NO: 28804 - DNA, 26 bp, Homo sapiens
taacacagcacgtggagaagtccggg

SEQ ID NO: 28805 - DNA, 26 bp, Homo sapiens
aacacagcacgtggagaagtccgggc

SEQ ID NO: 28806 - DNA, 26 bp, Homo sapiens
acacagcacgtggagaagtccgggca

SEQ ID NO: 28807 - DNA, 26 bp, Homo sapiens
cacagcacgtggagaagtccgggcat

SEQ ID NO: 28808 - DNA, 26 bp, Homo sapiens
acagcacgtggagaagtccgggcatt

SEQ ID NO: 28809 - DNA, 26 bp, Homo sapiens
cagcacgtggagaagtccgggcattc

SEQ ID NO: 28810 - DNA, 26 bp, Homo sapiens
agcacgtggagaagtccgggcattcg

SEQ ID NO: 28811 - DNA, 26 bp, Homo sapiens
gcacgtggagaagtccgggcattcga

SEQ ID NO: 28812 - DNA, 26 bp, Homo sapiens
cacgtggagaagtccgggcattcgaa

SEQ ID NO: 28813 - DNA, 26 bp, Homo sapiens
acgtggagaagtccgggcattcgaac

SEQ ID NO: 28814 - DNA, 26 bp, Homo sapiens
cgtggagaagtccgggcattcgaact

SEQ ID NO: 28815 - DNA, 26 bp, Homo sapiens
gtggagaagtccgggcattcgaactg

SEQ ID NO: 28816 - DNA, 26 bp, Homo sapiens
tggagaagtccgggcattcgaactga

SEQ ID NO: 28817 - DNA, 26 bp, Homo sapiens
ggagaagtccgggcattcgaactgac

SEQ ID NO: 28818 - DNA, 26 bp, Homo sapiens
gagaagtccgggcattcgaactgact

SEQ ID NO: 28819 - DNA, 26 bp, Homo sapiens
agaagtccgggcattcgaactgacta

SEQ ID NO: 28820 - DNA, 26 bp, Homo sapiens
gaagtccgggcattcgaactgactat

SEQ ID NO: 28821 - DNA, 26 bp, Homo sapiens
aagtccgggcattcgaactgactatc

SEQ ID NO: 28822 - DNA, 26 bp, Homo sapiens
agtccgggcattcgaactgactatca

SEQ ID NO: 28823 - DNA, 26 bp, Homo sapiens
gtccgggcattcgaactgactatcag

SEQ ID NO: 28824 - DNA, 26 bp, Homo sapiens
tccgggcattcgaactgactatcagg

SEQ ID NO: 28825 - DNA, 26 bp, Homo sapiens
ccgggcattcgaactgactatcaggg

SEQ ID NO: 28826 - DNA, 26 bp, Homo sapiens
cgggcattcgaactgactatcagggc

SEQ ID NO: 28827 - DNA, 26 bp, Homo sapiens
gggcattcgaactgactatcagggca

SEQ ID NO: 28828 - DNA, 26 bp, Homo sapiens
ggcattcgaactgactatcagggcac

SEQ ID NO: 28829 - DNA, 26 bp, Homo sapiens
gcattcgaactgactatcagggcact

SEQ ID NO: 28830 - DNA, 26 bp, Homo sapiens
cattcgaactgactatcagggcactg

SEQ ID NO: 28831 - DNA, 26 bp, Homo sapiens
attcgaactgactatcagggcactgg

SEQ ID NO: 28832 - DNA, 26 bp, Homo sapiens
ttcgaactgactatcagggcactgga

SEQ ID NO: 28833 - DNA, 26 bp, Homo sapiens
tcgaactgactatcagggcactggat

SEQ ID NO: 28834 - DNA, 26 bp, Homo sapiens
cgaactgactatcagggcactggatg

SEQ ID NO: 28835 - DNA, 26 bp, Homo sapiens
gaactgactatcagggcactggatgg

SEQ ID NO: 28836 - DNA, 26 bp, Homo sapiens
aactgactatcagggcactggatggc

SEQ ID NO: 28837 - DNA, 26 bp, Homo sapiens
actgactatcagggcactggatggca

SEQ ID NO: 28838 - DNA, 26 bp, Homo sapiens
ctgactatcagggcactggatggcac

SEQ ID NO: 28839 - DNA, 26 bp, Homo sapiens
tgactatcagggcactggatggcacc

SEQ ID NO: 28840 - DNA, 26 bp, Homo sapiens
gactatcagggcactggatggcaccc

SEQ ID NO: 28841 - DNA, 26 bp, Homo sapiens
actatcagggcactggatggcaccca

SEQ ID NO: 28842 - DNA, 26 bp, Homo sapiens
ctatcagggcactggatggcacccac

SEQ ID NO: 28843 - DNA, 26 bp, Homo sapiens
tatcagggcactggatggcacccacg

SEQ ID NO: 28844 - DNA, 26 bp, Homo sapiens
atcagggcactggatggcacccacgg

SEQ ID NO: 28845 - DNA, 26 bp, Homo sapiens
tcagggcactggatggcacccacgga

SEQ ID NO: 28846 - DNA, 26 bp, Homo sapiens
cagggcactggatggcacccacggag

SEQ ID NO: 28847 - DNA, 26 bp, Homo sapiens
agggcactggatggcacccacggagt

SEQ ID NO: 28848 - DNA, 26 bp, Homo sapiens
gggcactggatggcacccacggagtt

SEQ ID NO: 28849 - DNA, 26 bp, Homo sapiens
ggcactggatggcacccacggagttg

SEQ ID NO: 28850 - DNA, 26 bp, Homo sapiens
gcactggatggcacccacggagttgt

SEQ ID NO: 28851 - DNA, 26 bp, Homo sapiens
cactggatggcacccacggagttgtt

SEQ ID NO: 28852 - DNA, 26 bp, Homo sapiens
actggatggcacccacggagttgtta

SEQ ID NO: 28853 - DNA, 26 bp, Homo sapiens
ctggatggcacccacggagttgttac

SEQ ID NO: 28854 - DNA, 26 bp, Homo sapiens
tggatggcacccacggagttgttacc

SEQ ID NO: 28855 - DNA, 26 bp, Homo sapiens
ggatggcacccacggagttgttacct

SEQ ID NO: 28856 - DNA, 26 bp, Homo sapiens
gatggcacccacggagttgttacctg

SEQ ID NO: 28857 - DNA, 26 bp, Homo sapiens
atggcacccacggagttgttacctga

SEQ ID NO: 28858 - DNA, 26 bp, Homo sapiens
tggcacccacggagttgttacctgat

SEQ ID NO: 28859 - DNA, 26 bp, Homo sapiens
ggcacccacggagttgttacctgatc

SEQ ID NO: 28860 - DNA, 26 bp, Homo sapiens
gcacccacggagttgttacctgatct

SEQ ID NO: 28861 - DNA, 26 bp, Homo sapiens
cacccacggagttgttacctgatctt

SEQ ID NO: 28862 - DNA, 26 bp, Homo sapiens
acccacggagttgttacctgatcttt

SEQ ID NO: 28863 - DNA, 26 bp, Homo sapiens
cccacggagttgttacctgatctttg

SEQ ID NO: 28864 - DNA, 26 bp, Homo sapiens
ccacggagttgttacctgatctttgg

SEQ ID NO: 28865 - DNA, 26 bp, Homo sapiens
cacggagttgttacctgatctttgga

SEQ ID NO: 28866 - DNA, 26 bp, Homo sapiens
acggagttgttacctgatctttggaa

SEQ ID NO: 28867 - DNA, 26 bp, Homo sapiens
cggagttgttacctgatctttggaag

SEQ ID NO: 28868 - DNA, 26 bp, Homo sapiens
ggagttgttacctgatctttggaagc

SEQ ID NO: 28869 - DNA, 26 bp, Homo sapiens
gagttgttacctgatctttggaagca

SEQ ID NO: 28870 - DNA, 26 bp, Homo sapiens
agttgttacctgatctttggaagcag

SEQ ID NO: 28871 - DNA, 26 bp, Homo sapiens
gttgttacctgatctttggaagcagg

SEQ ID NO: 28872 - DNA, 26 bp, Homo sapiens
ttgttacctgatctttggaagcagga

SEQ ID NO: 28873 - DNA, 26 bp, Homo sapiens
tgttacctgatctttggaagcaggat

SEQ ID NO: 28874 - DNA, 26 bp, Homo sapiens
gttacctgatctttggaagcaggatc

SEQ ID NO: 28875 - DNA, 26 bp, Homo sapiens
ttacctgatctttggaagcaggatcg

SEQ ID NO: 28876 - DNA, 26 bp, Homo sapiens
tacctgatctttggaagcaggatcgc

SEQ ID NO: 28877 - DNA, 26 bp, Homo sapiens
acctgatctttggaagcaggatcgcc

SEQ ID NO: 28878 - DNA, 26 bp, Homo sapiens
cctgatctttggaagcaggatcgccc

SEQ ID NO: 28879 - DNA, 26 bp, Homo sapiens
ctgatctttggaagcaggatcgcccg

SEQ ID NO: 28880 - DNA, 26 bp, Homo sapiens
tgatctttggaagcaggatcgcccgt

SEQ ID NO: 28881 - DNA, 26 bp, Homo sapiens
gatctttggaagcaggatcgcccgtc

SEQ ID NO: 28882 - DNA, 26 bp, Homo sapiens
atctttggaagcaggatcgcccgtct

SEQ ID NO: 28883 - DNA, 26 bp, Homo sapiens
tctttggaagcaggatcgcccgtctg

SEQ ID NO: 28884 - DNA, 26 bp, Homo sapiens
ctttggaagcaggatcgcccgtctgc

SEQ ID NO: 28885 - DNA, 26 bp, Homo sapiens
tttggaagcaggatcgcccgtctgca

SEQ ID NO: 28886 - DNA, 26 bp, Homo sapiens
ttggaagcaggatcgcccgtctgcac

SEQ ID NO: 28887 - DNA, 26 bp, Homo sapiens
tggaagcaggatcgcccgtctgcact

SEQ ID NO: 28888 - DNA, 26 bp, Homo sapiens
ggaagcaggatcgcccgtctgcactg

SEQ ID NO: 28889 - DNA, 26 bp, Homo sapiens
gaagcaggatcgcccgtctgcactgc

SEQ ID NO: 28890 - DNA, 26 bp, Homo sapiens
aagcaggatcgcccgtctgcactgca

SEQ ID NO: 28891 - DNA, 26 bp, Homo sapiens
agcaggatcgcccgtctgcactgcag

SEQ ID NO: 28892 - DNA, 26 bp, Homo sapiens
gcaggatcgcccgtctgcactgcagt

SEQ ID NO: 28893 - DNA, 26 bp, Homo sapiens
caggatcgcccgtctgcactgcagtg

SEQ ID NO: 28894 - DNA, 26 bp, Homo sapiens
aggatcgcccgtctgcactgcagtgg

SEQ ID NO: 28895 - DNA, 26 bp, Homo sapiens
ggatcgcccgtctgcactgcagtgga

SEQ ID NO: 28896 - DNA, 26 bp, Homo sapiens
gatcgcccgtctgcactgcagtggaa

SEQ ID NO: 28897 - DNA, 26 bp, Homo sapiens
atcgcccgtctgcactgcagtggaag

SEQ ID NO: 28898 - DNA, 26 bp, Homo sapiens
tcgcccgtctgcactgcagtggaagc

SEQ ID NO: 28899 - DNA, 26 bp, Homo sapiens
cgcccgtctgcactgcagtggaagcc

SEQ ID NO: 28900 - DNA, 26 bp, Homo sapiens
gcccgtctgcactgcagtggaagccc

SEQ ID NO: 28901 - DNA, 26 bp, Homo sapiens
cccgtctgcactgcagtggaagcccc

SEQ ID NO: 28902 - DNA, 26 bp, Homo sapiens
ccgtctgcactgcagtggaagccccg

SEQ ID NO: 28903 - DNA, 26 bp, Homo sapiens
cgtctgcactgcagtggaagccccgt

SEQ ID NO: 28904 - DNA, 26 bp, Homo sapiens
gtctgcactgcagtggaagccccgtg

SEQ ID NO: 28905 - DNA, 26 bp, Homo sapiens
tctgcactgcagtggaagccccgtgg

SEQ ID NO: 28906 - DNA, 26 bp, Homo sapiens
ctgcactgcagtggaagccccgtggg

SEQ ID NO: 28907 - DNA, 26 bp, Homo sapiens
tgcactgcagtggaagccccgtgggc

SEQ ID NO: 28908 - DNA, 26 bp, Homo sapiens
gcactgcagtggaagccccgtgggca

SEQ ID NO: 28909 - DNA, 26 bp, Homo sapiens
cactgcagtggaagccccgtgggcag

SEQ ID NO: 28910 - DNA, 26 bp, Homo sapiens
actgcagtggaagccccgtgggcagc

SEQ ID NO: 28911 - DNA, 26 bp, Homo sapiens
ctgcagtggaagccccgtgggcagca

SEQ ID NO: 28912 - DNA, 26 bp, Homo sapiens
tgcagtggaagccccgtgggcagcag

SEQ ID NO: 28913 - DNA, 26 bp, Homo sapiens
gcagtggaagccccgtgggcagcagt

SEQ ID NO: 28914 - DNA, 26 bp, Homo sapiens
cagtggaagccccgtgggcagcagtg

SEQ ID NO: 28915 - DNA, 26 bp, Homo sapiens
agtggaagccccgtgggcagcagtga

SEQ ID NO: 28916 - DNA, 26 bp, Homo sapiens
gtggaagccccgtgggcagcagtgat

SEQ ID NO: 28917 - DNA, 26 bp, Homo sapiens
tggaagccccgtgggcagcagtgatg

SEQ ID NO: 28918 - DNA, 26 bp, Homo sapiens
ggaagccccgtgggcagcagtgatgg

SEQ ID NO: 28919 - DNA, 26 bp, Homo sapiens
gaagccccgtgggcagcagtgatggc

SEQ ID NO: 28920 - DNA, 26 bp, Homo sapiens
aagccccgtgggcagcagtgatggcc

SEQ ID NO: 28921 - DNA, 26 bp, Homo sapiens
agccccgtgggcagcagtgatggcca

SEQ ID NO: 28922 - DNA, 26 bp, Homo sapiens
gccccgtgggcagcagtgatggccat

SEQ ID NO: 28923 - DNA, 26 bp, Homo sapiens
ccccgtgggcagcagtgatggccatc

SEQ ID NO: 28924 - DNA, 26 bp, Homo sapiens
cccgtgggcagcagtgatggccatcc

SEQ ID NO: 28925 - DNA, 26 bp, Homo sapiens
ccgtgggcagcagtgatggccatccc

SEQ ID NO: 28926 - DNA, 26 bp, Homo sapiens
cgtgggcagcagtgatggccatcccc

SEQ ID NO: 28927 - DNA, 26 bp, Homo sapiens
gtgggcagcagtgatggccatccccg

SEQ ID NO: 28928 - DNA, 26 bp, Homo sapiens
tgggcagcagtgatggccatccccgc

SEQ ID NO: 28929 - DNA, 26 bp, Homo sapiens
gggcagcagtgatggccatccccgca

SEQ ID NO: 28930 - DNA, 26 bp, Homo sapiens
ggcagcagtgatggccatccccgcat

SEQ ID NO: 28931 - DNA, 26 bp, Homo sapiens
gcagcagtgatggccatccccgcatg

SEQ ID NO: 28932 - DNA, 26 bp, Homo sapiens
cagcagtgatggccatccccgcatgc

SEQ ID NO: 28933 - DNA, 26 bp, Homo sapiens
agcagtgatggccatccccgcatgcc

SEQ ID NO: 28934 - DNA, 26 bp, Homo sapiens
gcagtgatggccatccccgcatgcca

SEQ ID NO: 28935 - DNA, 26 bp, Homo sapiens
cagtgatggccatccccgcatgccac

SEQ ID NO: 28936 - DNA, 26 bp, Homo sapiens
agtgatggccatccccgcatgccacg

SEQ ID NO: 28937 - DNA, 26 bp, Homo sapiens
gtgatggccatccccgcatgccacgg

SEQ ID NO: 28938 - DNA, 26 bp, Homo sapiens
tgatggccatccccgcatgccacggc

SEQ ID NO: 28939 - DNA, 26 bp, Homo sapiens
gatggccatccccgcatgccacggcc

SEQ ID NO: 28940 - DNA, 26 bp, Homo sapiens
atggccatccccgcatgccacggcct

SEQ ID NO: 28941 - DNA, 26 bp, Homo sapiens
tggccatccccgcatgccacggcctc

SEQ ID NO: 28942 - DNA, 26 bp, Homo sapiens
ggccatccccgcatgccacggcctct

SEQ ID NO: 28943 - DNA, 26 bp, Homo sapiens
gccatccccgcatgccacggcctctg

SEQ ID NO: 28944 - DNA, 26 bp, Homo sapiens
ccatccccgcatgccacggcctctgg

SEQ ID NO: 28945 - DNA, 26 bp, Homo sapiens
catccccgcatgccacggcctctggg

SEQ ID NO: 28946 - DNA, 26 bp, Homo sapiens
atccccgcatgccacggcctctggga

SEQ ID NO: 28947 - DNA, 26 bp, Homo sapiens
tccccgcatgccacggcctctgggaa

SEQ ID NO: 28948 - DNA, 26 bp, Homo sapiens
ccccgcatgccacggcctctgggaag

SEQ ID NO: 28949 - DNA, 26 bp, Homo sapiens
cccgcatgccacggcctctgggaagg

SEQ ID NO: 28950 - DNA, 26 bp, Homo sapiens
ccgcatgccacggcctctgggaaggg

SEQ ID NO: 28951 - DNA, 26 bp, Homo sapiens
cgcatgccacggcctctgggaagggg

SEQ ID NO: 28952 - DNA, 26 bp, Homo sapiens
gcatgccacggcctctgggaaggggc

SEQ ID NO: 28953 - DNA, 26 bp, Homo sapiens
catgccacggcctctgggaaggggca

SEQ ID NO: 28954 - DNA, 26 bp, Homo sapiens
atgccacggcctctgggaaggggcag

SEQ ID NO: 28955 - DNA, 26 bp, Homo sapiens
tgccacggcctctgggaaggggcagc

SEQ ID NO: 28956 - DNA, 26 bp, Homo sapiens
gccacggcctctgggaaggggcagca

SEQ ID NO: 28957 - DNA, 26 bp, Homo sapiens
ccacggcctctgggaaggggcagcaa

SEQ ID NO: 28958 - DNA, 26 bp, Homo sapiens
cacggcctctgggaaggggcagcaac

SEQ ID NO: 28959 - DNA, 26 bp, Homo sapiens
acggcctctgggaaggggcagcaact

SEQ ID NO: 28960 - DNA, 26 bp, Homo sapiens
cggcctctgggaaggggcagcaactg

SEQ ID NO: 28961 - DNA, 26 bp, Homo sapiens
ggcctctgggaaggggcagcaactgg

SEQ ID NO: 28962 - DNA, 26 bp, Homo sapiens
gcctctgggaaggggcagcaactgga

SEQ ID NO: 28963 - DNA, 26 bp, Homo sapiens
cctctgggaaggggcagcaactggaa

SEQ ID NO: 28964 - DNA, 26 bp, Homo sapiens
ctctgggaaggggcagcaactggaag

SEQ ID NO: 28965 - DNA, 26 bp, Homo sapiens
tctgggaaggggcagcaactggaagt

SEQ ID NO: 28966 - DNA, 26 bp, Homo sapiens
ctgggaaggggcagcaactggaagtc

SEQ ID NO: 28967 - DNA, 26 bp, Homo sapiens
tgggaaggggcagcaactggaagtcc

SEQ ID NO: 28968 - DNA, 26 bp, Homo sapiens
gggaaggggcagcaactggaagtccc

SEQ ID NO: 28969 - DNA, 26 bp, Homo sapiens
ggaaggggcagcaactggaagtccct

SEQ ID NO: 28970 - DNA, 26 bp, Homo sapiens
gaaggggcagcaactggaagtccctg

SEQ ID NO: 28971 - DNA, 26 bp, Homo sapiens
aaggggcagcaactggaagtccctga

SEQ ID NO: 28972 - DNA, 26 bp, Homo sapiens
aggggcagcaactggaagtccctgag

SEQ ID NO: 28973 - DNA, 26 bp, Homo sapiens
ggggcagcaactggaagtccctgaga

SEQ ID NO: 28974 - DNA, 26 bp, Homo sapiens
gggcagcaactggaagtccctgagac

SEQ ID NO: 28975 - DNA, 26 bp, Homo sapiens
ggcagcaactggaagtccctgagacg

SEQ ID NO: 28976 - DNA, 26 bp, Homo sapiens
gcagcaactggaagtccctgagacgg

SEQ ID NO: 28977 - DNA, 26 bp, Homo sapiens
cagcaactggaagtccctgagacggt

SEQ ID NO: 28978 - DNA, 26 bp, Homo sapiens
agcaactggaagtccctgagacggta

SEQ ID NO: 28979 - DNA, 26 bp, Homo sapiens
gcaactggaagtccctgagacggtaa

SEQ ID NO: 28980 - DNA, 26 bp, Homo sapiens
caactggaagtccctgagacggtaaa

SEQ ID NO: 28981 - DNA, 26 bp, Homo sapiens
aactggaagtccctgagacggtaaag

SEQ ID NO: 28982 - DNA, 26 bp, Homo sapiens
actggaagtccctgagacggtaaaga

SEQ ID NO: 28983 - DNA, 26 bp, Homo sapiens
ctggaagtccctgagacggtaaagat

SEQ ID NO: 28984 - DNA, 26 bp, Homo sapiens
tggaagtccctgagacggtaaagatg

SEQ ID NO: 28985 - DNA, 26 bp, Homo sapiens
ggaagtccctgagacggtaaagatgc

SEQ ID NO: 28986 - DNA, 26 bp, Homo sapiens
gaagtccctgagacggtaaagatgca

SEQ ID NO: 28987 - DNA, 26 bp, Homo sapiens
aagtccctgagacggtaaagatgcag

SEQ ID NO: 28988 - DNA, 26 bp, Homo sapiens
agtccctgagacggtaaagatgcagg

SEQ ID NO: 28989 - DNA, 26 bp, Homo sapiens
gtccctgagacggtaaagatgcagga

SEQ ID NO: 28990 - DNA, 26 bp, Homo sapiens
tccctgagacggtaaagatgcaggag

SEQ ID NO: 28991 - DNA, 26 bp, Homo sapiens
ccctgagacggtaaagatgcaggagt

SEQ ID NO: 28992 - DNA, 26 bp, Homo sapiens
cctgagacggtaaagatgcaggagtg

SEQ ID NO: 28993 - DNA, 26 bp, Homo sapiens
ctgagacggtaaagatgcaggagtgg

SEQ ID NO: 28994 - DNA, 26 bp, Homo sapiens
tgagacggtaaagatgcaggagtggc

SEQ ID NO: 28995 - DNA, 26 bp, Homo sapiens
gagacggtaaagatgcaggagtggcc

SEQ ID NO: 28996 - DNA, 26 bp, Homo sapiens
agacggtaaagatgcaggagtggccg

SEQ ID NO: 28997 - DNA, 26 bp, Homo sapiens
gacggtaaagatgcaggagtggccgg

SEQ ID NO: 28998 - DNA, 26 bp, Homo sapiens
acggtaaagatgcaggagtggccggc

SEQ ID NO: 28999 - DNA, 26 bp, Homo sapiens
cggtaaagatgcaggagtggccggca

SEQ ID NO: 29000 - DNA, 26 bp, Homo sapiens
ggtaaagatgcaggagtggccggcag

SEQ ID NO: 29001 - DNA, 26 bp, Homo sapiens
gtaaagatgcaggagtggccggcaga

SEQ ID NO: 29002 - DNA, 26 bp, Homo sapiens
taaagatgcaggagtggccggcagag

SEQ ID NO: 29003 - DNA, 26 bp, Homo sapiens
aaagatgcaggagtggccggcagagc

SEQ ID NO: 29004 - DNA, 26 bp, Homo sapiens
aagatgcaggagtggccggcagagca

SEQ ID NO: 29005 - DNA, 26 bp, Homo sapiens
agatgcaggagtggccggcagagcag

SEQ ID NO: 29006 - DNA, 26 bp, Homo sapiens
gatgcaggagtggccggcagagcagt

SEQ ID NO: 29007 - DNA, 26 bp, Homo sapiens
atgcaggagtggccggcagagcagtg

SEQ ID NO: 29008 - DNA, 26 bp, Homo sapiens
tgcaggagtggccggcagagcagtgg

SEQ ID NO: 29009 - DNA, 26 bp, Homo sapiens
gcaggagtggccggcagagcagtggg

SEQ ID NO: 29010 - DNA, 26 bp, Homo sapiens
caggagtggccggcagagcagtgggc

SEQ ID NO: 29011 - DNA, 26 bp, Homo sapiens
aggagtggccggcagagcagtgggca

SEQ ID NO: 29012 - DNA, 26 bp, Homo sapiens
ggagtggccggcagagcagtgggcat

SEQ ID NO: 29013 - DNA, 26 bp, Homo sapiens
gagtggccggcagagcagtgggcatc

SEQ ID NO: 29014 - DNA, 26 bp, Homo sapiens
agtggccggcagagcagtgggcatca

SEQ ID NO: 29015 - DNA, 26 bp, Homo sapiens
gtggccggcagagcagtgggcatcaa

SEQ ID NO: 29016 - DNA, 26 bp, Homo sapiens
tggccggcagagcagtgggcatcaac

SEQ ID NO: 29017 - DNA, 26 bp, Homo sapiens
ggccggcagagcagtgggcatcaacc

SEQ ID NO: 29018 - DNA, 26 bp, Homo sapiens
gccggcagagcagtgggcatcaacct

SEQ ID NO: 29019 - DNA, 26 bp, Homo sapiens
ccggcagagcagtgggcatcaacctg

SEQ ID NO: 29020 - DNA, 26 bp, Homo sapiens
cggcagagcagtgggcatcaacctgg

SEQ ID NO: 29021 - DNA, 26 bp, Homo sapiens
ggcagagcagtgggcatcaacctggc

SEQ ID NO: 29022 - DNA, 26 bp, Homo sapiens
gcagagcagtgggcatcaacctggca

SEQ ID NO: 29023 - DNA, 26 bp, Homo sapiens
cagagcagtgggcatcaacctggcag

SEQ ID NO: 29024 - DNA, 26 bp, Homo sapiens
agagcagtgggcatcaacctggcagg

SEQ ID NO: 29025 - DNA, 26 bp, Homo sapiens
gagcagtgggcatcaacctggcaggg

SEQ ID NO: 29026 - DNA, 26 bp, Homo sapiens
agcagtgggcatcaacctggcagggg

SEQ ID NO: 29027 - DNA, 26 bp, Homo sapiens
gcagtgggcatcaacctggcaggggc

SEQ ID NO: 29028 - DNA, 26 bp, Homo sapiens
cagtgggcatcaacctggcaggggcc

SEQ ID NO: 29029 - DNA, 26 bp, Homo sapiens
agtgggcatcaacctggcaggggcca

SEQ ID NO: 29030 - DNA, 26 bp, Homo sapiens
gtgggcatcaacctggcaggggccac

SEQ ID NO: 29031 - DNA, 26 bp, Homo sapiens
tgggcatcaacctggcaggggccacc

SEQ ID NO: 29032 - DNA, 26 bp, Homo sapiens
gggcatcaacctggcaggggccaccc

SEQ ID NO: 29033 - DNA, 26 bp, Homo sapiens
ggcatcaacctggcaggggccaccca

SEQ ID NO: 29034 - DNA, 26 bp, Homo sapiens
gcatcaacctggcaggggccacccag

SEQ ID NO: 29035 - DNA, 26 bp, Homo sapiens
catcaacctggcaggggccacccaga

SEQ ID NO: 29036 - DNA, 26 bp, Homo sapiens
atcaacctggcaggggccacccagat

SEQ ID NO: 29037 - DNA, 26 bp, Homo sapiens
tcaacctggcaggggccacccagatg

SEQ ID NO: 29038 - DNA, 26 bp, Homo sapiens
caacctggcaggggccacccagatgc

SEQ ID NO: 29039 - DNA, 26 bp, Homo sapiens
aacctggcaggggccacccagatgcc

SEQ ID NO: 29040 - DNA, 26 bp, Homo sapiens
acctggcaggggccacccagatgcct

SEQ ID NO: 29041 - DNA, 26 bp, Homo sapiens
cctggcaggggccacccagatgcctg

SEQ ID NO: 29042 - DNA, 26 bp, Homo sapiens
ctggcaggggccacccagatgcctgc

SEQ ID NO: 29043 - DNA, 26 bp, Homo sapiens
tggcaggggccacccagatgcctgct

SEQ ID NO: 29044 - DNA, 26 bp, Homo sapiens
ggcaggggccacccagatgcctgctc

SEQ ID NO: 29045 - DNA, 26 bp, Homo sapiens
gcaggggccacccagatgcctgctca

SEQ ID NO: 29046 - DNA, 26 bp, Homo sapiens
caggggccacccagatgcctgctcag

SEQ ID NO: 29047 - DNA, 26 bp, Homo sapiens
aggggccacccagatgcctgctcagt

SEQ ID NO: 29048 - DNA, 26 bp, Homo sapiens
ggggccacccagatgcctgctcagtg

SEQ ID NO: 29049 - DNA, 26 bp, Homo sapiens
gggccacccagatgcctgctcagtgt

SEQ ID NO: 29050 - DNA, 26 bp, Homo sapiens
ggccacccagatgcctgctcagtgtt

SEQ ID NO: 29051 - DNA, 26 bp, Homo sapiens
gccacccagatgcctgctcagtgttg

SEQ ID NO: 29052 - DNA, 26 bp, Homo sapiens
ccacccagatgcctgctcagtgttgt

SEQ ID NO: 29053 - DNA, 26 bp, Homo sapiens
cacccagatgcctgctcagtgttgtg

SEQ ID NO: 29054 - DNA, 26 bp, Homo sapiens
acccagatgcctgctcagtgttgtgg

SEQ ID NO: 29055 - DNA, 26 bp, Homo sapiens
cccagatgcctgctcagtgttgtggg

SEQ ID NO: 29056 - DNA, 26 bp, Homo sapiens
ccagatgcctgctcagtgttgtgggc

SEQ ID NO: 29057 - DNA, 26 bp, Homo sapiens
cagatgcctgctcagtgttgtgggcc

SEQ ID NO: 29058 - DNA, 26 bp, Homo sapiens
agatgcctgctcagtgttgtgggcca

SEQ ID NO: 29059 - DNA, 26 bp, Homo sapiens
gatgcctgctcagtgttgtgggccat

SEQ ID NO: 29060 - DNA, 26 bp, Homo sapiens
atgcctgctcagtgttgtgggccatt

SEQ ID NO: 29061 - DNA, 26 bp, Homo sapiens
tgcctgctcagtgttgtgggccattt

SEQ ID NO: 29062 - DNA, 26 bp, Homo sapiens
gcctgctcagtgttgtgggccatttg

SEQ ID NO: 29063 - DNA, 26 bp, Homo sapiens
cctgctcagtgttgtgggccatttgt

SEQ ID NO: 29064 - DNA, 26 bp, Homo sapiens
ctgctcagtgttgtgggccatttgtc

SEQ ID NO: 29065 - DNA, 26 bp, Homo sapiens
tgctcagtgttgtgggccatttgtcc

SEQ ID NO: 29066 - DNA, 26 bp, Homo sapiens
gctcagtgttgtgggccatttgtcca

SEQ ID NO: 29067 - DNA, 26 bp, Homo sapiens
ctcagtgttgtgggccatttgtccag

SEQ ID NO: 29068 - DNA, 26 bp, Homo sapiens
tcagtgttgtgggccatttgtccaga

SEQ ID NO: 29069 - DNA, 26 bp, Homo sapiens
cagtgttgtgggccatttgtccagaa

SEQ ID NO: 29070 - DNA, 26 bp, Homo sapiens
agtgttgtgggccatttgtccagaag

SEQ ID NO: 29071 - DNA, 26 bp, Homo sapiens
gtgttgtgggccatttgtccagaagg

SEQ ID NO: 29072 - DNA, 26 bp, Homo sapiens
tgttgtgggccatttgtccagaaggg

SEQ ID NO: 29073 - DNA, 26 bp, Homo sapiens
gttgtgggccatttgtccagaagggg

SEQ ID NO: 29074 - DNA, 26 bp, Homo sapiens
ttgtgggccatttgtccagaagggga

SEQ ID NO: 29075 - DNA, 26 bp, Homo sapiens
tgtgggccatttgtccagaaggggac

SEQ ID NO: 29076 - DNA, 26 bp, Homo sapiens
gtgggccatttgtccagaaggggacg

SEQ ID NO: 29077 - DNA, 26 bp, Homo sapiens
tgggccatttgtccagaaggggacgg

SEQ ID NO: 29078 - DNA, 26 bp, Homo sapiens
gggccatttgtccagaaggggacggc

SEQ ID NO: 29079 - DNA, 26 bp, Homo sapiens
ggccatttgtccagaaggggacggca

SEQ ID NO: 29080 - DNA, 26 bp, Homo sapiens
gccatttgtccagaaggggacggcag

SEQ ID NO: 29081 - DNA, 26 bp, Homo sapiens
ccatttgtccagaaggggacggcagc

SEQ ID NO: 29082 - DNA, 26 bp, Homo sapiens
catttgtccagaaggggacggcagca

SEQ ID NO: 29083 - DNA, 26 bp, Homo sapiens
atttgtccagaaggggacggcagcag

SEQ ID NO: 29084 - DNA, 26 bp, Homo sapiens
tttgtccagaaggggacggcagcagc

SEQ ID NO: 29085 - DNA, 26 bp, Homo sapiens
ttgtccagaaggggacggcagcagct

SEQ ID NO: 29086 - DNA, 26 bp, Homo sapiens
tgtccagaaggggacggcagcagctg

SEQ ID NO: 29087 - DNA, 26 bp, Homo sapiens
gtccagaaggggacggcagcagctgt

SEQ ID NO: 29088 - DNA, 26 bp, Homo sapiens
tccagaaggggacggcagcagctgta

SEQ ID NO: 29089 - DNA, 26 bp, Homo sapiens
ccagaaggggacggcagcagctgtag

SEQ ID NO: 29090 - DNA, 26 bp, Homo sapiens
cagaaggggacggcagcagctgtagc

SEQ ID NO: 29091 - DNA, 26 bp, Homo sapiens
agaaggggacggcagcagctgtagct

SEQ ID NO: 29092 - DNA, 26 bp, Homo sapiens
gaaggggacggcagcagctgtagctg

SEQ ID NO: 29093 - DNA, 26 bp, Homo sapiens
aaggggacggcagcagctgtagctgg

SEQ ID NO: 29094 - DNA, 26 bp, Homo sapiens
aggggacggcagcagctgtagctggc

SEQ ID NO: 29095 - DNA, 26 bp, Homo sapiens
ggggacggcagcagctgtagctggct

SEQ ID NO: 29096 - DNA, 26 bp, Homo sapiens
gggacggcagcagctgtagctggctc

SEQ ID NO: 29097 - DNA, 26 bp, Homo sapiens
ggacggcagcagctgtagctggctcc

SEQ ID NO: 29098 - DNA, 26 bp, Homo sapiens
gacggcagcagctgtagctggctcct

SEQ ID NO: 29099 - DNA, 26 bp, Homo sapiens
acggcagcagctgtagctggctcctc

SEQ ID NO: 29100 - DNA, 26 bp, Homo sapiens
cggcagcagctgtagctggctcctcc

SEQ ID NO: 29101 - DNA, 26 bp, Homo sapiens
ggcagcagctgtagctggctcctccg

SEQ ID NO: 29102 - DNA, 26 bp, Homo sapiens
gcagcagctgtagctggctcctccgg

SEQ ID NO: 29103 - DNA, 26 bp, Homo sapiens
cagcagctgtagctggctcctccggg

SEQ ID NO: 29104 - DNA, 26 bp, Homo sapiens
agcagctgtagctggctcctccgggg

SEQ ID NO: 29105 - DNA, 26 bp, Homo sapiens
gcagctgtagctggctcctccggggt

SEQ ID NO: 29106 - DNA, 26 bp, Homo sapiens
cagctgtagctggctcctccggggtc

SEQ ID NO: 29107 - DNA, 26 bp, Homo sapiens
agctgtagctggctcctccggggtcc

SEQ ID NO: 29108 - DNA, 26 bp, Homo sapiens
gctgtagctggctcctccggggtcca

SEQ ID NO: 29109 - DNA, 26 bp, Homo sapiens
ctgtagctggctcctccggggtccag

SEQ ID NO: 29110 - DNA, 26 bp, Homo sapiens
tgtagctggctcctccggggtccagg

SEQ ID NO: 29111 - DNA, 26 bp, Homo sapiens
gtagctggctcctccggggtccaggc

SEQ ID NO: 29112 - DNA, 26 bp, Homo sapiens
tagctggctcctccggggtccaggca

SEQ ID NO: 29113 - DNA, 26 bp, Homo sapiens
agctggctcctccggggtccaggcag

SEQ ID NO: 29114 - DNA, 26 bp, Homo sapiens
gctggctcctccggggtccaggcagc

SEQ ID NO: 29115 - DNA, 26 bp, Homo sapiens
ctggctcctccggggtccaggcagca

SEQ ID NO: 29116 - DNA, 26 bp, Homo sapiens
tggctcctccggggtccaggcagcag

SEQ ID NO: 29117 - DNA, 26 bp, Homo sapiens
ggctcctccggggtccaggcagcagg

SEQ ID NO: 29118 - DNA, 26 bp, Homo sapiens
gctcctccggggtccaggcagcaggc

SEQ ID NO: 29119 - DNA, 26 bp, Homo sapiens
ctcctccggggtccaggcagcaggcc

SEQ ID NO: 29120 - DNA, 26 bp, Homo sapiens
tcctccggggtccaggcagcaggcca

SEQ ID NO: 29121 - DNA, 26 bp, Homo sapiens
cctccggggtccaggcagcaggccac

SEQ ID NO: 29122 - DNA, 26 bp, Homo sapiens
ctccggggtccaggcagcaggccaca

SEQ ID NO: 29123 - DNA, 26 bp, Homo sapiens
tccggggtccaggcagcaggccacag

SEQ ID NO: 29124 - DNA, 26 bp, Homo sapiens
ccggggtccaggcagcaggccacagg

SEQ ID NO: 29125 - DNA, 26 bp, Homo sapiens
cggggtccaggcagcaggccacaggg

SEQ ID NO: 29126 - DNA, 26 bp, Homo sapiens
ggggtccaggcagcaggccacagggc

SEQ ID NO: 29127 - DNA, 26 bp, Homo sapiens
gggtccaggcagcaggccacagggca

SEQ ID NO: 29128 - DNA, 26 bp, Homo sapiens
ggtccaggcagcaggccacagggcag

SEQ ID NO: 29129 - DNA, 26 bp, Homo sapiens
gtccaggcagcaggccacagggcaga

SEQ ID NO: 29130 - DNA, 26 bp, Homo sapiens
tccaggcagcaggccacagggcagaa

SEQ ID NO: 29131 - DNA, 26 bp, Homo sapiens
ccaggcagcaggccacagggcagaac

SEQ ID NO: 29132 - DNA, 26 bp, Homo sapiens
caggcagcaggccacagggcagaact

SEQ ID NO: 29133 - DNA, 26 bp, Homo sapiens
aggcagcaggccacagggcagaactg

SEQ ID NO: 29134 - DNA, 26 bp, Homo sapiens
ggcagcaggccacagggcagaactga

SEQ ID NO: 29135 - DNA, 26 bp, Homo sapiens
gcagcaggccacagggcagaactgac

SEQ ID NO: 29136 - DNA, 26 bp, Homo sapiens
cagcaggccacagggcagaactgacc

SEQ ID NO: 29137 - DNA, 26 bp, Homo sapiens
agcaggccacagggcagaactgacca

SEQ ID NO: 29138 - DNA, 26 bp, Homo sapiens
gcaggccacagggcagaactgaccat

SEQ ID NO: 29139 - DNA, 26 bp, Homo sapiens
caggccacagggcagaactgaccatc

SEQ ID NO: 29140 - DNA, 26 bp, Homo sapiens
aggccacagggcagaactgaccatct

SEQ ID NO: 29141 - DNA, 26 bp, Homo sapiens
ggccacagggcagaactgaccatctg

SEQ ID NO: 29142 - DNA, 26 bp, Homo sapiens
gccacagggcagaactgaccatctgg

SEQ ID NO: 29143 - DNA, 26 bp, Homo sapiens
ccacagggcagaactgaccatctggg

SEQ ID NO: 29144 - DNA, 26 bp, Homo sapiens
cacagggcagaactgaccatctgggc

SEQ ID NO: 29145 - DNA, 26 bp, Homo sapiens
acagggcagaactgaccatctgggca

SEQ ID NO: 29146 - DNA, 26 bp, Homo sapiens
cagggcagaactgaccatctgggcac

SEQ ID NO: 29147 - DNA, 26 bp, Homo sapiens
agggcagaactgaccatctgggcacc

SEQ ID NO: 29148 - DNA, 26 bp, Homo sapiens
gggcagaactgaccatctgggcaccg

SEQ ID NO: 29149 - DNA, 26 bp, Homo sapiens
ggcagaactgaccatctgggcaccgc

SEQ ID NO: 29150 - DNA, 26 bp, Homo sapiens
gcagaactgaccatctgggcaccgcg

SEQ ID NO: 29151 - DNA, 26 bp, Homo sapiens
cagaactgaccatctgggcaccgcgt

SEQ ID NO: 29152 - DNA, 26 bp, Homo sapiens
agaactgaccatctgggcaccgcgtt

SEQ ID NO: 29153 - DNA, 26 bp, Homo sapiens
gaactgaccatctgggcaccgcgttc

SEQ ID NO: 29154 - DNA, 26 bp, Homo sapiens
aactgaccatctgggcaccgcgttcc

SEQ ID NO: 29155 - DNA, 26 bp, Homo sapiens
actgaccatctgggcaccgcgttcca

SEQ ID NO: 29156 - DNA, 26 bp, Homo sapiens
ctgaccatctgggcaccgcgttccag

SEQ ID NO: 29157 - DNA, 26 bp, Homo sapiens
tgaccatctgggcaccgcgttccagc

SEQ ID NO: 29158 - DNA, 26 bp, Homo sapiens
gaccatctgggcaccgcgttccagcc

SEQ ID NO: 29159 - DNA, 26 bp, Homo sapiens
accatctgggcaccgcgttccagcca

SEQ ID NO: 29160 - DNA, 26 bp, Homo sapiens
ccatctgggcaccgcgttccagccac

SEQ ID NO: 29161 - DNA, 26 bp, Homo sapiens
catctgggcaccgcgttccagccacc

SEQ ID NO: 29162 - DNA, 26 bp, Homo sapiens
atctgggcaccgcgttccagccacca

SEQ ID NO: 29163 - DNA, 26 bp, Homo sapiens
tctgggcaccgcgttccagccaccag

SEQ ID NO: 29164 - DNA, 26 bp, Homo sapiens
ctgggcaccgcgttccagccaccagc

SEQ ID NO: 29165 - DNA, 26 bp, Homo sapiens
tgggcaccgcgttccagccaccagcc

SEQ ID NO: 29166 - DNA, 26 bp, Homo sapiens
gggcaccgcgttccagccaccagccc

SEQ ID NO: 29167 - DNA, 26 bp, Homo sapiens
ggcaccgcgttccagccaccagccct

SEQ ID NO: 29168 - DNA, 26 bp, Homo sapiens
gcaccgcgttccagccaccagccctg

SEQ ID NO: 29169 - DNA, 26 bp, Homo sapiens
caccgcgttccagccaccagccctgc

SEQ ID NO: 29170 - DNA, 26 bp, Homo sapiens
accgcgttccagccaccagccctgct

SEQ ID NO: 29171 - DNA, 26 bp, Homo sapiens
ccgcgttccagccaccagccctgctg

SEQ ID NO: 29172 - DNA, 26 bp, Homo sapiens
cgcgttccagccaccagccctgctgt

SEQ ID NO: 29173 - DNA, 26 bp, Homo sapiens
gcgttccagccaccagccctgctgtt

SEQ ID NO: 29174 - DNA, 26 bp, Homo sapiens
cgttccagccaccagccctgctgtta

SEQ ID NO: 29175 - DNA, 26 bp, Homo sapiens
gttccagccaccagccctgctgttaa

SEQ ID NO: 29176 - DNA, 26 bp, Homo sapiens
ttccagccaccagccctgctgttaag

SEQ ID NO: 29177 - DNA, 26 bp, Homo sapiens
tccagccaccagccctgctgttaagg

SEQ ID NO: 29178 - DNA, 26 bp, Homo sapiens
ccagccaccagccctgctgttaaggc

SEQ ID NO: 29179 - DNA, 26 bp, Homo sapiens
cagccaccagccctgctgttaaggcc

SEQ ID NO: 29180 - DNA, 26 bp, Homo sapiens
agccaccagccctgctgttaaggcca

SEQ ID NO: 29181 - DNA, 26 bp, Homo sapiens
gccaccagccctgctgttaaggccac

SEQ ID NO: 29182 - DNA, 26 bp, Homo sapiens
ccaccagccctgctgttaaggccacc

SEQ ID NO: 29183 - DNA, 26 bp, Homo sapiens
caccagccctgctgttaaggccaccc

SEQ ID NO: 29184 - DNA, 26 bp, Homo sapiens
accagccctgctgttaaggccaccca

SEQ ID NO: 29185 - DNA, 26 bp, Homo sapiens
ccagccctgctgttaaggccacccag

SEQ ID NO: 29186 - DNA, 26 bp, Homo sapiens
cagccctgctgttaaggccacccagc

SEQ ID NO: 29187 - DNA, 26 bp, Homo sapiens
agccctgctgttaaggccacccagct

SEQ ID NO: 29188 - DNA, 26 bp, Homo sapiens
gccctgctgttaaggccacccagctc

SEQ ID NO: 29189 - DNA, 26 bp, Homo sapiens
ccctgctgttaaggccacccagctca

SEQ ID NO: 29190 - DNA, 26 bp, Homo sapiens
cctgctgttaaggccacccagctcac

SEQ ID NO: 29191 - DNA, 26 bp, Homo sapiens
ctgctgttaaggccacccagctcacc

SEQ ID NO: 29192 - DNA, 26 bp, Homo sapiens
tgctgttaaggccacccagctcacca

SEQ ID NO: 29193 - DNA, 26 bp, Homo sapiens
gctgttaaggccacccagctcaccag

SEQ ID NO: 29194 - DNA, 26 bp, Homo sapiens
ctgttaaggccacccagctcaccagg

SEQ ID NO: 29195 - DNA, 26 bp, Homo sapiens
tgttaaggccacccagctcaccaggg

SEQ ID NO: 29196 - DNA, 26 bp, Homo sapiens
gttaaggccacccagctcaccagggt

SEQ ID NO: 29197 - DNA, 26 bp, Homo sapiens
ttaaggccacccagctcaccagggtc

SEQ ID NO: 29198 - DNA, 26 bp, Homo sapiens
taaggccacccagctcaccagggtcc

SEQ ID NO: 29199 - DNA, 26 bp, Homo sapiens
aaggccacccagctcaccagggtcca

SEQ ID NO: 29200 - DNA, 26 bp, Homo sapiens
aggccacccagctcaccagggtccac

SEQ ID NO: 29201 - DNA, 26 bp, Homo sapiens
ggccacccagctcaccagggtccaca

SEQ ID NO: 29202 - DNA, 26 bp, Homo sapiens
gccacccagctcaccagggtccacat

SEQ ID NO: 29203 - DNA, 26 bp, Homo sapiens
ccacccagctcaccagggtccacatg

SEQ ID NO: 29204 - DNA, 26 bp, Homo sapiens
cacccagctcaccagggtccacatgg

SEQ ID NO: 29205 - DNA, 26 bp, Homo sapiens
acccagctcaccagggtccacatggt

SEQ ID NO: 29206 - DNA, 26 bp, Homo sapiens
cccagctcaccagggtccacatggtc

SEQ ID NO: 29207 - DNA, 26 bp, Homo sapiens
ccagctcaccagggtccacatggtct

SEQ ID NO: 29208 - DNA, 26 bp, Homo sapiens
cagctcaccagggtccacatggtctg

SEQ ID NO: 29209 - DNA, 26 bp, Homo sapiens
agctcaccagggtccacatggtctgc

SEQ ID NO: 29210 - DNA, 26 bp, Homo sapiens
gctcaccagggtccacatggtctgcc

SEQ ID NO: 29211 - DNA, 26 bp, Homo sapiens
ctcaccagggtccacatggtctgcct

SEQ ID NO: 29212 - DNA, 26 bp, Homo sapiens
tcaccagggtccacatggtctgcctg

SEQ ID NO: 29213 - DNA, 26 bp, Homo sapiens
caccagggtccacatggtctgcctgc

SEQ ID NO: 29214 - DNA, 26 bp, Homo sapiens
accagggtccacatggtctgcctgcg

SEQ ID NO: 29215 - DNA, 26 bp, Homo sapiens
ccagggtccacatggtctgcctgcgt

SEQ ID NO: 29216 - DNA, 26 bp, Homo sapiens
cagggtccacatggtctgcctgcgtc

SEQ ID NO: 29217 - DNA, 26 bp, Homo sapiens
agggtccacatggtctgcctgcgtcc

SEQ ID NO: 29218 - DNA, 26 bp, Homo sapiens
gggtccacatggtctgcctgcgtccg

SEQ ID NO: 29219 - DNA, 26 bp, Homo sapiens
ggtccacatggtctgcctgcgtccga

SEQ ID NO: 29220 - DNA, 26 bp, Homo sapiens
gtccacatggtctgcctgcgtccgac

SEQ ID NO: 29221 - DNA, 26 bp, Homo sapiens
tccacatggtctgcctgcgtccgact

SEQ ID NO: 29222 - DNA, 26 bp, Homo sapiens
ccacatggtctgcctgcgtccgactc

SEQ ID NO: 29223 - DNA, 26 bp, Homo sapiens
cacatggtctgcctgcgtccgactcc

SEQ ID NO: 29224 - DNA, 26 bp, Homo sapiens
acatggtctgcctgcgtccgactccg

SEQ ID NO: 29225 - DNA, 26 bp, Homo sapiens
catggtctgcctgcgtccgactccgc

SEQ ID NO: 29226 - DNA, 26 bp, Homo sapiens
atggtctgcctgcgtccgactccgcg

SEQ ID NO: 29227 - DNA, 26 bp, Homo sapiens
tggtctgcctgcgtccgactccgcgg

SEQ ID NO: 29228 - DNA, 26 bp, Homo sapiens
ggtctgcctgcgtccgactccgcggt

SEQ ID NO: 29229 - DNA, 26 bp, Homo sapiens
gtctgcctgcgtccgactccgcggtc

SEQ ID NO: 29230 - DNA, 26 bp, Homo sapiens
tctgcctgcgtccgactccgcggtcc

SEQ ID NO: 29231 - DNA, 26 bp, Homo sapiens
ctgcctgcgtccgactccgcggtcct

SEQ ID NO: 29232 - DNA, 26 bp, Homo sapiens
tgcctgcgtccgactccgcggtcctt

SEQ ID NO: 29233 - DNA, 26 bp, Homo sapiens
gcctgcgtccgactccgcggtccttg

SEQ ID NO: 29234 - DNA, 26 bp, Homo sapiens
cctgcgtccgactccgcggtccttgg

SEQ ID NO: 29235 - DNA, 26 bp, Homo sapiens
ctgcgtccgactccgcggtccttggg

SEQ ID NO: 29236 - DNA, 26 bp, Homo sapiens
tgcgtccgactccgcggtccttgggc

SEQ ID NO: 29237 - DNA, 26 bp, Homo sapiens
gcgtccgactccgcggtccttgggca

SEQ ID NO: 29238 - DNA, 26 bp, Homo sapiens
cgtccgactccgcggtccttgggcag

SEQ ID NO: 29239 - DNA, 26 bp, Homo sapiens
gtccgactccgcggtccttgggcagc

SEQ ID NO: 29240 - DNA, 26 bp, Homo sapiens
tccgactccgcggtccttgggcagca

SEQ ID NO: 29241 - DNA, 26 bp, Homo sapiens
ccgactccgcggtccttgggcagcag

SEQ ID NO: 29242 - DNA, 26 bp, Homo sapiens
cgactccgcggtccttgggcagcagc

1. (canceled)

2. A composition comprising a nucleic acid sequence encoding a target RNA knockdown and replacement therapeutic comprising:
(a) a first nucleic acid sequence encoding an RNA-binding polypeptide or portion thereof; and
(b) a second nucleic acid sequence encoding a wild-type rhodopsin therapeutic protein,
wherein the RNA-binding polypeptide binds and cleaves a target rhodopsin RNA and wherein the target rhodopsin RNA encodes a pathogenic rhodopsin protein with one or more gain-or-loss-of-function mutations.

3.-4. (canceled)

5. The composition of claim 2, wherein the target rhodopsin and therapeutic rhodopsin are human rhodopsin.

6. The composition of claim 2, wherein the therapeutic rhodopsin is a hardened rhodopsin.

7. The composition of claim 2, wherein the RNA binding protein comprises a Pumilio and FBF (PUF) protein.

8. The composition of claim 2, wherein the RNA binding protein comprises a Pumilio-based assembly (PUMBY) protein.

9. The composition of claim 2, wherein the target rhodopsin RNA sequence comprises CAACGAGTCTTTTGTCATCTACATGT (SEQ ID NO: 462), CGCCAGCGTGGCATTCTACATCTTCA (SEQ ID NO: 463), or CATCTATATCATGATGAACAAGCAGT (SEQ ID NO: 464).

10. The composition of claim 9, wherein the target rhodopsin RNA encodes an amino acid sequence comprising YASVAFYIFT (SEQ ID NO: 486) at position 268 to 277.

11. The composition of claim 6, wherein the hardened rhodopsin is encoded by a nucleic acid sequence which does not comprise the target rhodopsin RNA comprising GCCAGCGTGGCATTCTACATCTTC (SEQ ID NO: 406).

12. The composition of claim 11, wherein the hardened rhodopsin is encoded by a nucleic acid sequence comprising GCTTCCGTAGCTTTTTATATTTTT (SEQ ID NO: 408).

13. The composition of claim 2, wherein the nucleic acid sequence comprises at least one promoter.

14. The composition of claim 13, wherein the at least one promoter is a constitutive promoter or a tissue-specific promoter.

15. The composition of claim 14, wherein the at least one promoter is selected from the group consisting of opsin promoter, EFS promoter, and both.

16. The composition of claim 2, wherein the nucleic acid sequence comprises two promoters.

17. A vector comprising the composition of claim 2.

18. The vector of claim 17, wherein the vector is selected from the group consisting of: adeno-associated virus, retrovirus, lentivirus, adenovirus, nanoparticle, micelle, liposome, lipoplex, polymersome, polyplex, and dendrimer.

19. A cell comprising the vector of claim 17.

20. The composition of claim 2, wherein the RNA-binding polypeptide is a first RNA-binding polypeptide, and wherein the nucleic acid sequence encodes a second RNA-binding polypeptide which binds RNA in a manner in which it associates with RNA.

21. The composition of claim 20, wherein the second RNA-binding polypeptide associates with RNA in a manner in which it cleaves RNA.

22. The composition of claim 20, wherein the second RNA-binding polypeptide is selected from the group consisting of: RNAse1, RNAse4, RNAse6, RNAse7, RNAse8, RNAse2, RNAse6PL, RNAseL, RNAseT2, RNAse11, RNAseT2-like, NOB1, ENDOV, ENDOG, ENDOD1, hFEN1, hSLFN14, hLACTB2, APEX2, ANG, HRSP12, ZC3H12A, RIDA, PDL6, NTHL, KIAA0391, APEX1, AGO2, EXOG, ZC3H12D, ERN2, PELO, YBEY, CPSF4L, hCG_2002731, ERCC1, RAC1, RAA1, RAB1, DNA2, FLJ35220, FLJ13173, ERCC4, Rnase1(K41R), Rnase1(K41R, D121E), Rnase1(K41R, D121E, H119N), Rnase1(H119N), Rnase1(R39D, N67D, N88A, G89D, R91D, H119N), Rnase1(R39D, N67D, N88A, G89D, R91D, H119N, K41R, D121E), Rnase1(R39D, N67D, N88A, G89D, R91D), TENM1, TENM2, RNAseK, TALEN, ZNF638, and hSMG6.

23. The composition of claim 22, wherein the second RNA-binding polypeptide is ZC3H12A.

24. A method for reducing the level of expression of a pathogenic target RNA molecule or a protein encoded by the pathogenic RNA molecule and replacing gain-or-loss-of-function mutations caused by the pathogenic target RNA with a therapeutic replacement protein, the method comprising contacting the composition of claim 2 and the pathogenic target RNA molecule comprising a target RNA sequence under conditions suitable for binding of the RNA binding protein to the target RNA sequence, wherein the level of expression of the pathogenic target RNA is reduced, and wherein the expression of the pathogenic target RNA is replaced with expression of a therapeutic replacement protein.

25. An adeno-associated viral (AAV) vector comprising the composition of claim 2.
